United States Patent Application Publication US 2020/0002709 A1 - sequence listing, part 2

SEQ ID NO: 4821 - DNA, 395 bp, Artificial
  Mutations within GlyA3B4 introduced by GmGlyA3B4_T03TALE nuclease
gttcatgtacggttgcagatataaacgaagcatagcttatgtatgaggtgtaacaaaattggaaacaatagccatgcaaggtgaagaatgtcaccaactcagaaacccttcttcattgacgtgtccctcactcactctcctctcttcactataaatcgccactcttcgtgttctccacttcaccaactccttcaaacttattaacactttccttagttcaatatggggaagcccttcttcactctctctctttcttccctttgcttgctactcttgtcgagtgcatgctttgctattacctccagcaagtaagcttaacgtgataacaataatagtaatatgaaatatttattaaatttttataattaatctctgctagaaaatttgattaatca

SEQ ID NO: 4822 - DNA, 484 bp, Artificial
  Mutations within GlyA3B4 introduced by GmGlyA3B4_T03TALE nuclease
gttcatgtacggttgcagatataaacgaagcatagcttatgtatgaggtgtaacaaaattggaaacaatagccatgcaaggtgaagaatgtcaccaactcagaaacccttcttcattgacgtgtccctcactcactctcctctcttcactataaatcgccactcttcgtgttctccacttcaccaactccttcaaacttattaacactttccttagttcaatatggggaagcccttcttcactctctctctttcttccctcaaccgcaacggcctccacttgccatcttactcaccttatccccaaatgatcattgtcgttcaaggtgcgtaatattagtaagaagtatttatcagcttaacgtgataacaataatagtaatatgaaatatttattaaattttttataattaatctctgctagaaaatttgattaatcatttttaagtagaatttgtttttctcaactaggtttttaaacacca

SEQ ID NO: 4823 - DNA, 426 bp, Artificial; identical to SEQ ID NO: 4777
  Mutations within GlyA3B4 introduced by GmGlyA3B4_T03TALE nuclease

SEQ ID NO: 4824 - DNA, 650 bp, Artificial
  Mutations within GlyA3B4 introduced by GmGlyA3B4_T03TALE nuclease
gttcatgtacggttgcagatataaacgaagcatagcttatgtatgaggtgtaacaaaattggaaacaatagccatgcaaggtgaagaatgtcaccaactcagaaacccttcttcattgacgtgtccctcactcactctcctctcttcactataaatcgccactcttcgtgttctccacttcaccaactccttcaaacttattaacactttccttagttcaatatggggaagcccttcttcactctctctctttcttccctttgcttgctactcttgtcgagtgcatgctttgctattacctccagcaagttcaacgcgttggaacccgaccaccgcgttgagtccgaaggtggtcttattgaaacatggaactctcaacaccctgagctgcaatgcgccggtgtcactgtttccaaacgcaccctcagccgcaacggcctccacttgccatcttactcaccttatccccaaatgatcattgtcgttcaaggtgcgtaatattagtaagaagtatttatcagcttaacgtgataacaataatagtaatatgaaatatttattaaattttttataattaatctctgctagaaaatttgattaatcatttttagtagaatttgttttttctcaactaggttttaaacaccaca

SEQ ID NO: 4825 - DNA, 605 bp, Artificial
  Mutations within GlyA3B4 introduced by GmGlyA3B4_T03TALE nuclease
gttcatgtacggttgcagatataaacgaagcatagcttatgtatgaggtgtaacaaaattggaaacaatagccatgcaaggtgaagaatgtcaccaactcagaaacccttcttcattgacgtgtccctcactcactctcctctcttcactataaatcgccactcttcgtgttctccacttcaccaactccttcaaacttattaacactttccttagttcaatatggggaagcccttcttcactctctctctttcttcccttcttcactctctctctttcaacaacctcaacgcgttggaacccgaccaccgcgttgagtccgaaggtggtcttattgaaacatggaactctcaacaccctgagctgcaatgcgccggtgtcactgtttccaaacgcaccctcaaccgcaacggcctccacttgccatcttactcaccttatccccaaatgatcattgtcgttcaaggtgcgtaatattagtaagaagtatttatcagcttaacgtgataacaataatagtaatatgaaatatttattaatttttataattaatctctgctagaaaatttgattaatcatttttagtagaatttgtttttctcaac

SEQ ID NO: 4826 - DNA, 524 bp, Artificial
  Mutations within GlyA3B4 introduced by GmGlyA3B4_T03TALE nuclease
gttcatgtacggttgcagatataaacgaagcatagcttatgtatgaggtgtaacaaaattggaaacaatagccatgcaaggtgaagaatgtcaccaactcagaaacccttcttcattgacgtgtccctcactcactctcctctcttcactataaatcgccactcttcgtgttctccacttcaccaactcaacaacctcaacgcgttggaacccgaccaccgcgttgagtccgaaggtggtcttattgaaacatggaactctcaacaccctgagctgcaatgcgccggtgtcactgtttccaaacgcaccctcaaccgcaacggcctccacttgccatcttactcaccttatccccaaatgatcattgtcgttcaaggtgcgtaatattagtaagaagtattttatcagcttaacgtgataacaataatagtaatatgaaaatattttattaaattttttataattaatctctgctagaaaatttgattaatcatttttagtagaatttgtttttctcaactagg

SEQ ID NO: 4827 - DNA, 618 bp, Artificial
  Mutations within GlyA3B4 introduced by GmGlyA3B4_T03TALE nuclease
gttcatgtacggttgcagatataaacgaagcatagcttatgtatgaggtgtaacaaaattggaaacaatagccatgcaaggtgaagaatgtcaccaactcagaaacccttcttcattgacgtgtccctcactcactctcctctcttcactataaatcgccactcttcgtgttctccacttcaccaactccttcaaacttattaacactttccttagttcaatatggggaagcccttcttcactctctctctttcttccctttgcttgctactcttgtcgagtgccaactcaacaacctcaacgcgttggaacccgaccaccgcgttgagtccgaaggtggtcttattgaaacatggaactctcaacaccctgagctgcaatgcgccggtgtcactgtttccaaacgcaccctcaaccgcaacggcctccacttgccatcttactcaccttatccccaaatgatcattgtcgttcaaggtgcgtaatattagtaagaagtatttatcagcttaacgtgataacaataatagtaatatgaaatatttattaattttttataattaatctctgctagaaaatttgattaatcatttttagtagaatttgtttttctcaact

SEQ ID NO: 4828 - DNA, 499 bp, Artificial
  Mutations within GlyA3B4 introduced by GmGlyA3B4_T03TALE nuclease
gttcatgtacggttgcagatataaacgaagcatagcttatgtatgaggtgtaacaaaattggaaacaatagccatgcaaggtgaagaatgtcaccaactcagaaacccttcttcattgacgtgtccctcactcactctcctctctgccaactcaacaacctcaacgcgttggaacccgaccaccgcgttgagtccgaaggtggtcttattgaaacatggaactctcaacaccctgagctgcaatgcgccggtgtcactgtttccaaacgcaccctcaaccgcaacggcctccacttgccatcttactcaccttatccccaaatgatcattgtcgttcaaggtgcgtaatattagtaagaagtatttatcagcttaacgtgataacaataatagtaatatgaaatatttattaaattttttataattaatctctgctagaaaatttgattaatcatttttagtagaatttgtttttctcaactaggttttaaacaccaca

SEQ ID NO: 4829 - DNA, 643 bp, Artificial
  Mutations within GlyA3B4 introduced by GmGlyA3B4_T03TALE nuclease
gttcatgtacggttgcagatataaacgaagcatagcttatgtatgaggtgtaacaaaattggaaacaatagccatgcaaggtgaagaatgtcaccaactcagaaacccttcttcattgacgtgtccctcactcactctcctctcttcactataaatcgccactcttcgtgttctccacttcaccaactccttcaaacttattaacactttccttagttcaatatggggaagcccttcttcactctctctctttcttccctttgcttgctactcttgtcgagtgcatgctttgctattacctccagcaagttgccaactcaacaacctcaacgcgttggaacccgaccaccgcgttgagtccgaaggtggtcttattgaaacatggaactctcaacaccctgagctgcaatgcgccggtgtcactgtttccaaacgcaccctcaaccgcaacggcctccacttgccatcttactcaccttatccccaaatgatcattgtcgttcaaggtgcgtaatattagtaagaagtatttatcagcttaacgtgataacaataatagtaatatgaaatatttattaaatttttataattaatctctgctagaaaatttgattaatcattttagtagaatttgttttctcaa

SEQ ID NO: 4830 - DNA, 653 bp, Artificial
  Mutations within GlyA3B4 introduced by GmGlyA3B4_T03TALE nuclease
gttcatgtacggttgcagatataaacgaagcatagcttatgtatgaggtgtaacaaaattggaaacaatagccatgcaaggtgaagaatgtcaccaactcagaaacccttcttcattgacgtgtccctcactcactctcctctcttcactataaatcgccactcttcgtgttctccacttcaccaactccttcaaacttattaacactttccttagttcaatatggggaagcccttcttcactctctctctttcttccctttgcttgctactcttgtcgagtgcatgctttgctattacctccagcaagtagtgccaactcaacaacctcaacgcgttggaacccgaccaccgcgttgagtccgaaggtggtcttattgaaacatggaactctcaacaccctgagctgcaatgcgccggtgtcactgtttccaaacgcaccctcaaccgcaacggcctccacttgccatcttactcaccttatccccaaatgatcattgtcgttcaaggtgcgtaatattagtaagaagtatttatcagcttaacgtgataacaatatagtaatatgaaatatttattaaatttttataattaatctctgctagaaaatttgattaatcattttagtagaatttgttttctcaactaggtttt

SEQ ID NO: 4831 - DNA, 660 bp, Artificial
  Mutations within GlyA3B4 introduced by GmGlyA3B4_T03TALE nuclease
gttcatgtacggttgcagatataaacgaagcatagcttatgtatgaggtgtaacaaaattggaaacaatagccatgcaaggtgaagaatgtcaccaactcagaaacccttcttcattgacgtgtccctcactcactctcctctcttcactataaatcgccactcttcgtgttctccacttcaccaactccttcaaacttattaacactttccttagttcaatatggggaagcccttcttcactctctctctttcttccctttgcttgctactcttgtcgagtgcatgctttgctattacctccagcaagttcagtgccaactcaacaacctcaacgcgttggaacccgaccaccgcgttgagtccgaaggtggtcttattgaaacatggaactctcaacaccctgagctgcaatgcgccggtgtcactgtttccaaacgcaccctcaaccgcaacggcctccacttgccatcttactcaccttatccccaaatgatcattgtcgttcaaggtgcgtaatattagtaagaagtatttatcagcttaacgtgataacaataatagtaatatgaaatatttattaaatttttataattaatctctgctagaaaatttgattaatcattttagtagaatttgttttctcaactaggttttaaaa

SEQ ID NO: 4832 - DNA, 415 bp, Artificial
  Mutations within GlyA3B4 introduced by GmGlyA3B4_T03TALE nuclease
gttcatgtacggttgcagatataaacgaagcatagcttatgtatgaggtgtaacaaaattggaaacaatagccatgcaaggtgaagaatgtcaccaactcagaaacccttcttcattgacgtgtccctcactcactctcctctcttcactataaatcgccactcttcgtgttctccacttcaccaactccttcaaacttattaacactttcccgaccaccgcgttgagtccgaaggtggtcttattgaaacatggaactctcaacaccctgagctgcaatgcgccggtgtcactgtttccaaacgcaccctcaaccgcaacggcctccacttgccatcttactcaccttatccccaatgcaatcattgttcgttcaggtgcagtaattagtaagaagtattatcagtcttacgtg

SEQ ID NO: 4833 - DNA, 639 bp, Artificial
  Mutations within GlyA3B4 introduced by GmGlyA3B4_T03TALE nuclease
gttcatgtacggttgcagatataaacgaagcatagcttatgtatgaggtgtaacaaaattggaaacaatagccatgcaaggtgaagaatgtcaccaactcagaaacccttcttcattgacgtgtccctcactcactctcctctcttcactataaatcgccactcttcgtgttctccacttcaccaactccttcaaacttattaacactttccttagttcaatatggggaagcccttcttcactctctctctttcttccctttgcttgctactcttgtcgagtgcatgctttgctattacctccagcaagttctcaacaacctcaacgcgttggaacccgaccaccgcgttgagtccgaaggtggtcttattgaaacatggaactctcaacaccctgagctgcaatgcgccggtgtcactgtttccaaacgcaccctcaaccgcaacggcctccacttgccatcttactcaccttatccccaaatgatcattgtcgttcaaggtgcgtaatattagtaagaagtatttatcaagcttaacgtgataacaataatagtaatatgaaatatttattaaatttttataattaatctctgctagaaaatttgattaatcattttagtagaatttgttttctcaa

SEQ ID NO: 4834 - DNA, 664 bp, Artificial
  Mutations within GlyA3B4 introduced by GmGlyA3B4_T03TALE nuclease
gttcatgtacggttgcagatataaacgaagcatagcttatgtatgaggtgtaacaaaattggaaacaatagccatgcaaggtgaagaatgtcaccaactcggaaacccttcttcattgacgtgtccctcactcactctcctctcttcactataaatcgccactcttcgtgttctccacttcaccaactccttcaaacttattaacactttccttagttcaatatggggaagcccttcttcactctctctctttcttccctttgcttgctactcttgtcgagtgcatgctttgctattacctccagcaagttgagtgccaactcaacaacctcaacgcgttggaacccgaccaccgcgttgagtccgaaggtggtcttattgaaacatggaactctcaacaccctgagctgcaatgcgccggtgtcactgtttccaaacgcaccctcaaccgcaacggcctccacttgccatcttactcaccttatccccaaactgatcattgtcgttcaaggtgcgtaatattagtaagaagtatttatcagcttaacgtgataacaatatagtaatatgaaatatttattaaatttttataattaatctctgctagaaaatttgattaatcattttagtagaatttgttttctcaactaggttttaaacacca

SEQ ID NO: 4835 - DNA, 632 bp, Artificial
  Mutations within GlyA3B4 introduced by GmGlyA3B4_T03TALE nuclease
gttcatgtacggttgcagatataaacgaagcatagcttatgtatgaggtgtaacaaaattggaaacaatagccatgcaaggtgaagaatgtcaccaactcagaaacccttcttcattgacgtgtccctcactcactctcctctcttcactataaatcgccactcttcgtgttctccacttcaccaactccttcaaacttattaacactttccttagttcaatatggggaagcccttcttcactctctctctttcttccctttgcttgctactcttgtcgagtgcatgctttgctattacctccagcaagtgccaactcaacaacctcaacgcgttggaacccgaccaccgcgttgagtccgaaggtggtcttattgaaacatggaactctcaacaccctgagctgcaatgcgccggtgtcactgtttccaaacgcaccctcaaccgcaacggcctccacttgccatcttactcaccttatccccaaatgatcattgtcgttcaaggtgcgtaatattagtaagaagtatttatcagcttaacgtgataacaatatagtaatatgaaatatttattaaatttttataattaatctctgctagaaaatttgattaatcattttagtagaatttg

SEQ ID NO: 4836 - DNA, 644 bp, Artificial
  Mutations within GlyA3B4 introduced by GmGlyA3B4_T03TALE nuclease
gttcatgtacggttgcagatataaacgaagcatagcttatgtatgaggtgtaacaaaattggaaacaatagccatgcaaggtgaagaatgtcaccaactcagaaacccttcttcattgacgtgtccctcactcactctcctctcttcactataaatcgccactcttcgtgttctccacttcaccaactccttcaaacttattaacactttccttagttcaatatggggaagcccttcttcactctctctctttcttccctttgcttgctactcttgtcgagtgcatgctttgctattacctccagcaagtagtgccaactcaacaacctcaacgcgttggaacccgaccaccgcgttgagtccgaaggtggtcttattgaaacatggaactctcaacaccctgagctgcaatgcgccggtgtcactgtttccaaacgcaccctcaaccgcaacggcctccacttgccatcttactcaccttatccccaaatgatcattgtcgttcaaggtgcgtaatattagtaagaagtatttatcagcttaacgtgataacaatatagtaatatgaaatatttattaaatttttataattaatctctgctagaaaatttgattaatcattttagtagaatttgttttctcaa

SEQ ID NO: 4837 - DNA, 660 bp, Artificial
  Mutations within GlyA3B4 introduced by GmGlyA3B4_T03TALE nuclease
gttcatgtacggttgcagatataaacgaagcatagcttatgtatgaggtgtaacaaaattggaaacaatagccatgcaaggtgaagaatgtcaccaactcagaaacccttcttcattgacgtgtccctcactcactctcctctcttcactataaatcgccactcttcgtgttctccacttcaccaactccttcaaacttattaacactttccttagttcaatatggggaagcccttcttcactctctctctttcttccctttgcttgctactcttgtcgagtgcatgctttgctattacctccagcaagttcaagtgccaactcaacaacctcaacgcgttggaacccgaccaccgcgttgagtccgaaggtggtcttattgaaacatggaactctcaacaccctgagctgcaatgcgccggtgtcactgtttccaaacgcaccctcaaccgcaacggcctccacttgccatcttactcaccttatccccaaatgatcattgtcgttcaaggtgcgtaatattagtaagaagtatttatcagcttaacgtgataacaatatagtaatatgaaatatttattaaatttttataattaatctctgctagaaaatttgattaatcattttagtagaatttgttttctcaactaggttttaaaa

SEQ ID NO: 4838 - DNA, 513 bp, Artificial
  Mutations within GlyA3B4 introduced by GmGlyA3B4_T03TALE nuclease
gttcatgtacggttgcagatataaacgaagcatagcttatgtatgaggtgtaacaaaattggaaacaatagccatgcaaggtgaagaatgtcaccaactcagaaacccttcttcattgacgtgtccctcactcactctcctctcttcactataaatcgccactcttcgtgttctccacttcaccaactccttcaaacttattaacactttccttagttcaatatggggaagcccttcttcaactcaacaacctcaacgcgttggaacccgaccaccgcgttgagtccgaaggtggtcttattgaaacatggaactctcaacaccctgagctgcaatgcgccggtgtcactgtttccaaacgcaccctcaaccgcaacggcctccacttgccatcttactcaccttatccccaaatgatcattgtcgttcaaggtgcgtaatattagtaagaagtatttatcagcttaacgtgataacaataatagtaatatgaaatatttattaaatttttat

SEQ ID NO: 4839 - DNA, 533 bp, Artificial
  Mutations within GlyA3B4 introduced by GmGlyA3B4_T03TALE nuclease
gttcatgtacggttgcagatataaacgaagcatagcttatgtatgaggtgtaacaaaattggaaacaatagccatgcaaggtgaagaatgtcaccaactcagaaacccttcttcattgacgtgtccctcactcactctcctctcttcactataaatcgccactcttcgtgttctccacttcaccaactccttcaaacttgccaactcaacaacctcaacgcgttggaacccgaccaccgcgttgagtccgaaggtggtcttattgaaacatggaactctcaacaccctgagctgcaatgcgccggtgtcactgtttccaaacgcaccctcaaccgcaacggcctccacttgccatcttactcaccttatccccaaatgatcattgtcgttcaaggtgcgtaatattagtaagaagtatttatcagcttaacgtgataacaataatagtaatatgaaatatttattaaattttttataattaatctctgctagaaaatttgattaatcatttttagtagaatttgttttttctc

SEQ ID NO: 4840 - DNA, 637 bp, Artificial
  Mutations within GlyA3B4 introduced by GmGlyA3B4_T03TALE nuclease
gttcatgtacggttgcagatataaacgaagcatagcttatgtatgaggtgtaacaaaattggaaacaatagccatgcaaggtgaagaatgtcaccaactcagaaacccttcttcattgacgtgtccctcactcactctcctctcttcactataaatcgccactcttcgtgttctccacttcaccaactccttcaaacttattaacactttccttagttcaatatggggaagcccttcttcactctctctctttcttccctttgcttgctactcttgtcgagtgcatgctttgctattacctccagcaagttgagtgccaactcaacaacctcaacgcgttggaacccgaccaccgcgttgagtccgaaggtggtcttattgaaacatggaactctcaacaccctgagctgcaatgcgccggtgtcactgtttccaaacgcaccctcaccgcaacggcctccacttgccatcttactcaccttatcccaactgaatcattgtcgttcaaggtgcgtaatattagtaagaagtatttatcagcttaacgtgataacaataatagtaatatgaaatatttattaaatttttataattaatctctgctagaaaatttgattaatcattttagtagaatttg

SEQ ID NO: 4841 - DNA, 644 bp, Artificial
  Mutations within GlyA3B4 introduced by GmGlyA3B4_T03TALE nuclease
gttcatgtacggttgcagatataaacgaagcatagcttatgtatgaggtgtaacaaaattggaaacaatagccatgcaaggtgaagaatgtcaccaactcagaaacccttcttcattgacgtgtccctcactcactctcctctcttcactataaatcgccactcttcgtgttctccacttcaccaactccttcaaacttattaacactttccttagttcaatatggggaagcccttcttcactctctctctttcttccctttgcttgctactcttgtcgagtgcatgctttgctattacctccagcaagttcaacaactcaacaacctcaacgcgttggaacccgaccaccgcgttgagtccgaaggtggtcttattgaaacatggaactctcaacaccctgagctgcaatgcgccggtgtcactgtttccaaacgcaccctcaaccgcaacggcctccacttgccatcttactcaccttatccccaaatgatcattgtcgttcaaggtgcgtaatattagtaagaagtatttatcagcttaacgtgataacaataatagtaatatgaaatatttattaaatttttataattaatctctgctagaaatttgattaatcattttagtagaatttgtttttctcaa

SEQ ID NO: 4842 - DNA, 657 bp, Artificial
  Mutations within GlyA3B4 introduced by GmGlyA3B4_T03TALE nuclease
gttcatgtacggttgcagatataaacgaagcatagcttatgtatgaggtgtaacaaaattggaaacaatagccatgcaaggtgaagaatgtcaccaactcagaaacccttcttcattgacgtgtccctcactcactctcctctcttcactataaatcgccactcttcgtgttctccacttcaccaactccttcaaacttattaacactttccttagttcaatatggggaagcccttcttcactctctctctttcttccctttgcttgctactcttgtcgagtgcatgctttgctattacctccagcagtgccaactcaacaacctcaacgcgttggaacccgaccaccgcgttgagtccgaaggtggtcttattgaacatggaactctcaacaccctgagctgcaatgcgccggtgtcactgtttccaaacgcaccctcaaccgcaacggcctccacttgccatcttactcaccttatccccaaatgatcattgtcgttcaaggtgcgtaatattagtaagaagtatttatcagcttaacgtgataacaatatagtaatatgaaatatttattaaatttttataattaatctctgctagaaaatttgattaatcattttagtagaatttgttttctcaactaggttttaaaacacca

SEQ ID NO: 4843 - DNA, 560 bp, Artificial
  Mutations within GlyA3B4 introduced by GmGlyA3B4_T03TALE nuclease
gttcatgtacggttgcagatataaacgaagcatagcttatgtatgaggtgtaacaaaattggaaacaatagccatgcaaggtgaagaatgtcaccaactcagaaacccttcttcattgacgtgtccctcactcactctcctctcttcactataaatcgccactcttcgtgttctccacttcaccaactccttcaaacttattaacactttccttagttcaatatggggaagcccttcttcactctctctctttcttccctttgcttgctactcttgtcgagtgcatgctttgctattacccgaccaccgcgttgagtccgaaggtggtcttattgaaacatggaactctcaacaccctgagctgcaatgcgccggtgtcactgtttccaaacgcaccctcaaccgcaacggcctccacttgccatcttactcaccttatccccaaatgatcattgtcgttcaaggtgcgtaatattagtaagaagtatttatcagcttaacgtgataacaataatagtaatatgaaatatttattaatttttataattaatctctgctag

SEQ ID NO: 4844 - DNA, 656 bp, Artificial
  Mutations within GlyA3B4 introduced by GmGlyA3B4_T03TALE nuclease
gttcatgtacggttgcagatataaacgaagcatagcttatgtatgaggtgtaacaaaattggaaacaatagccatgcaaggtgaagaatgtcaccaactcagaaacccttcttcattgacgtgtccctcactcactctcctctcttcactataaatcgccactcttcgtgttctccacttcaccaactccttcaaacttattaacactttccttagttcaatatggggaagcccttcttcactctctctctttcttccctttgcttgctactcttgtcgagtgcatgctttgctattacctccagcaaacgtgccaactcaacaacctcaacgcgttggaacccgaccaccgcgttgagtccgaaggtggtcttattgaaacatggaactctcaacaccctgagctgcaatgcgccggtgtcactgtttccaaacgcaccctcaaccgcaacggcctccacttgccatcttactcaccttatccccaaatgatcattgtcgttcaaggtgcgtaatattagtaagaagtatttatcagcttaacgtgataacaataatagtaatatgaaatatttattaaatttttataattaatctctgctagaaaatttgattaatcattttagtagaatttgttttctcaactaggttttaaa

SEQ ID NO: 4845 - DNA, 623 bp, Artificial
  Mutations within GlyA3B4 introduced by GmGlyA3B4_T03TALE nuclease
gttcatgtacggttgcagatataaacgaagcatagcttatgtatgaggtgtaacaaaattggaaacaatagccatgcaaggtgaagaatgtcaccaactcagaaacccttcttcattgacgtgtccctcactcactctcctctcttcactataaatcgccactcttcgtgttctccacttcaccaactccttcaaacttattaacactttccttagttcaatatggggaagcccttcttcactctctctctttcttccctttgcttgctactcttgtcgagtgcatgctttgctattacctccagcaagttgagtgccaactcaacaacctcaacgcgttggaacccgaccaccgcgttgagtccgaaggtggtcttattgaaacatggaactctcaacaccctgagctgcaatgcgccggtgtcactgtttccaaacgcaccctcaaccgcaacggcctccacttgccatcttactcaccttatccccaaatgatcattgtcgttcaaggtgcgtaatattagtaagaagtatttatcagcttaacgtgataacaataatagtaatatgaaatatttattaaatttttataattaatctctgctagaaaatttgattaatca

SEQ ID NO: 4846 - DNA, 457 bp, Artificial
  Mutations within GlyA3B4 introduced by GmGlyA3B4_T03TALE nuclease
gttcatgtacggttgcagatataaacgaagcatagcttatgtatgaggtgtaacaaaattggaaacaatagccatgcaaggtgaagaatgtcaccaactcagaaacccttcttcattgacgtgtccctcactcactctccgcgttgagtccgaaggtggtcttattgaaacatggaactctcaacaccctgagctgcaatgcgccggtgtcactgtttccaaacgcaccctcaaccgcaacggcctccacttgccatcttactcaccttatccccaaatgatcattgtcgttcaaggtgcgtaatattagtaagaagtatttatcagcttaacgtgataacaataatagtaatatgaaatatttattaaattttttataattaaattctctgctagaaatttgattaatcatttttagtagaatttgtttttctcaactaggtttttaaacaccaca

SEQ ID NO: 4847 - DNA, 499 bp, Artificial; identical to SEQ ID NO: 4828
  Mutations within GlyA3B4 introduced by GmGlyA3B4_T03TALE nuclease

SEQ ID NO: 4848 - DNA, 627 bp, Artificial
  Mutations within GlyA3B4 introduced by GmGlyA3B4_T03TALE nuclease
gttcatgtacggttgcagatataaacgaagcatagcttatgtatgaggtgtaacaaaattggaaacaatagccatgcaaggtgaagaatgtcaccaactcagaaacccttcttcattgacgtgtccctcactcactctcctctcttcactataaatcgccactcttcgtgttctccacttcaccaactccttcaaacttattaacactttccttagttcaatatggggaagcccttcttcactctctctctttcttccctttgcttgctactcttgtcgagtgcatgctttgctattacctccagccaactcaacaacctcaacgcgttggaacccgaccaccgcgttgagtccgaaggtggtcttattgaaacatggaactctcaacaccctgagctgcaatgcgccggtgtcactgtttccaaacgcaccctcaaccgcaacggcctccacttgccatcttactcaccttatccccaaatgatcattgtcgttcaaggtgcgtaatattagtaagaagtatttatcagcttaacgtgataacaataatagtaatatgaaatatttattaaatttttataattaatctctgctagaaaatttgattaatcattttagtagaatttg

SEQ ID NO: 4849 - DNA, 637 bp, Artificial
  Mutations within GlyA3B4 introduced by GmGlyA3B4_T03TALE nuclease
gttcatgtacggttgcagatataaacgaagcatagcttatgtatgaggtgtaacaaaattggaaacaatagccatgcaaggtgaagaatgtcaccaactcagaaacccttcttcattgacgtgtccctcactcactctcctctcttcactataaatcgccactcttcgtgttctccacttcaccaactccttcaaacttattaacactttccttagttcaatatggggaagcccttcttcactctctctctttcttccctttgcttgctactcttgtcgagtgcatgctttgctattacctccagcaagttcgtgccaactcaacaacctcaacgcgttggaacccgaccaccgcgttgagtccgaaggtggtcttattgaaacatggaactctcaacaccctgagctgcaatgcgccggtgtcactgtttccaaacgcaccctcaaccgcaacggcctccacttgccatcttactcaccttatccccaaatgatcattgtcgttcaaggtgcgtaatattagtaagaagtatttatcagcttaacgtgataacaataatagtaatatgaaatatttattaaatttttataattaatctctgctagaaaatttgattaatcattttagtagaatttg

SEQ ID NO: 4850 - DNA, 643 bp, Artificial; identical to SEQ ID NO: 4829
  Mutations within GlyA3B4 introduced by GmGlyA3B4_T03TALE nuclease

SEQ ID NO: 4851 - DNA, 651 bp, Artificial
  Mutations within GlyA3B4 introduced by GmGlyA3B4_T03TALE nuclease
gttcatgtacggttgcagatataaacgaagcatagcttatgtatgaggtgtaacaaaattggaaacaatagccatgcaaggtgaagaatgtcaccaactcagaaacccttcttcattgacgtgtccctcactcactctcctctcttcactataaatcgccactcttcgtgttctccacttcaccaactccttcaaacttattaacactttccttagttcaatatggggaagcccttcttcactctctctctttcttccctttgcttgctactcttgtcgagtgcatgctttgctattacctccagcaaagtgccaactcaacaacctcaacgcgttggaacccgaccaccgcgttgagtccgaaggtggtcttattgaaacatggaactctcaacaccctgagctgcaatgcgccggtgtcactgtttccaaacgcaccctcaaccgcaacggcctccacttgccatcttactcaccttatccccaaatgatcattgtcgttcaaggtgcgtaatattagtaagaagtatttatcagcttaacgtgataacaatatagtaatatgaaatatttattaaatttttataattaatctctgctagaaaatttgattaatcattttagtagaatttgttttctcaactaggtttt

SEQ ID NO: 4852 - DNA, 615 bp, Artificial
  Mutations within GlyA3B4 introduced by GmGlyA3B4_T03TALE nuclease
gttcatgtacggttgcagatataaacgaagcatagcttatgtatgaggtgtaacaaaattggaaacaatagccatgcaaggtgaagaatgtcaccaactcagaaacccttcttcattgacgtgtccctcactcactctcctctcttcactataaatcgccactcttcgtgttctccacttcaccaactccttcaaacttattaacactttccttagttcaatatggggaagcccttcttcactctctctctttcttccctttgcttgctactcttgtcgagtgccaactcaacaacctcaacgcgttggaacccgaccaccgcgttgagtccgaaggtggtcttattgaaacatggaactctcaacaccctgagctgcaatgcgccggtgtcactgtttccaaacgcaccctcaaccgcaacggcctccacttgccatcttactcaccttatccccaaatgatcattgtcgttcaaggtgcgtaatattagtaagaagtatttatcagcttaacgtgataacaataatagtaatatgaaatatttattaatttttataattaatctctgctagaaatttgattaatcatttttagtagaatttgtttttctcaac

SEQ ID NO: 4853 - DNA, 636 bp, Artificial
  Mutations within GlyA3B4 introduced by GmGlyA3B4_T03TALE nuclease
gttcatgtacggttgcagatataaacgaagcatagcttatgtatgaggtgtaacaaaattggaaacaatagccatgcaaggtgaagaatgtcaccaactcagaaacccttcttcattgacgtgtccctcactcactctcctctcttcactataaatcgccactcttcgtgttctccacttcaccaactccttcaaacttattaacactttccttagttcaatatggggaagcccttcttcactctctctctttcttccctttgcttgctactcttgtcgagtgcatgctttgctattacctccagcaagtcagtgccactcaacaacctcaacgcgttggaacccgaccaccgcgttgagtccgaaggtggtcttattgaaacatggaactctcaacaccctgagctgcaatgcgccggtgtcactgtttccaaacgcaccctcaaccgcaacggcctccacttgccatcttactcaccttatccccaaatgatcattgtcgttcaaggtgcgtaatattagtaagaagtatttatcagcttaacgtgataacaataatagtaatatgaaatatttattaaatttttataattaatctctgctagaaaatttgattaatcattttagtagaatttg

SEQ ID NO: 4854 - DNA, 623 bp, Artificial
  Mutations within GlyA3B4 introduced by GmGlyA3B4_T03TALE nuclease
gttcatgtacggttgcagatataaacgaagcatagcttatgtatgaggtgtaacaaaattggaaacaatagccatgcaaggtgaagaatgtcaccaactcagaaacccttcttcattgacgtgtccctcactcactctcctctcttcactataaatcgccactcttcgtgttctccacttcaccaactccttcaaacttattaacactttccttagttcaatatggggaagcccttcttcactctctctctttcttccctttgcttgctactcttgtcgagtgcatgctttgctattacctccagcaagttcaatgccaactcaacaacctcaacgcgttggaacccgaccaccgcgttgagtccgaaggtggtcttattgaaacatggaactctcaacaccctgagctgcaatgcgccggtgtcactgtttccaaacgcaccctcaaccgcaacggcctccacttgccatcttactcaccttatccccaaatgatcattgtcgttcaaggtgcgtaatattagtaagaagtatttatcagcttaacgtgataacaataatagtaatatgaaatatttattaaatttttataattaatctctgctagaaaatttgattaatca

SEQ ID NO: 4855 - DNA, 613 bp, Artificial
  Mutations within GlyA3B4 introduced by GmGlyA3B4_T03TALE nuclease
gttcatgtacggttgcagatataaacgaagcatagcttatgtatgaggtgtaacaaaattggaaacaatagccatgcaaggtgaagaatgtcaccaactcagaaacccttcttcattgacgtgtccctcactcactctcctctcttcactataaatcgccactcttcgtgttctccacttcaccaactccttcaaacttattaacactttccttagttcaatatggggaagcccttcttcactctctctctttcttccctttgcttgctactcttgtcgagtgcatgctttgctattacctccagcaagttcaacgacaacctcaacgcgttggaacccgaccaccgcgttgagtccgaaggtggtcttattgaacatggaactctcaacaccctgagctgcaatgcgccggtgtcactgtttccaaacgcaccctcaaccgcaacggcctccacttgccatcttactcaccttatccccaaatgatcattgtcgttcaaggtgcgtaatattagtaagaagtatttatcagcttaacgtgataacaatatagtaatatgaaatatttattaaatttttataattaatctctgctagaaaatttgattaatca

SEQ ID NO: 4856 - DNA, 499 bp, Artificial
  Mutations within GlyA3B4 introduced by GmGlyA3B4_T03TALE nuclease
gttcatgtacggttgcagatataaacgaagcatagcttatgtatgaggtgtaacaaaattggaaacaatagccatgcaaggtgaagaatgtcaccaactcagaaacccttcttcattgacgtgtccctcactcactctcctctcttcactataaatcgccactcttcgtgttctccacttcaccgcgttgagtccgaaggtggtcttattgaaacatggaactctcaacaccctgagctgcaatgcgccggtgtcactgtttccaaacgcaccctcaaccgcaacggcctccacttgccatcttactcaccttatccccaaatgatcattgtcgttcaaggtgcgtaatattagtaagaagtatttatcagcttaacgtgataacaataatagtaatatgaaatatttattaaattttttataattaatctctgctagaaaatttgattaatcatttttagtagaatttgtttttctcaactaggttttaaacaccaca

SEQ ID NO: 4857 - DNA, 660 bp, Artificial
  Mutations within GlyA3B4 introduced by GmGlyA3B4_T03TALE nuclease
gttcatgtacggttgcagatataaacgaagcatagcttatgtatgaggtgtaacaaaattggaaacaatagccatgcaaggtgaagaatgtcaccaactcagaaacccttcttcattgacgtgtccctcactcactctcctctcttcactataaatcgccactcttcgtgttctccacttcaccaactccttcaaacttattaacactttccttagttcaatatggggaagcccttcttcactctctctctttcttccctttgcttgctactcttgtcgagtgcatgctttgctattacctccagcaagccaactcaacaacctcaacgcgttggaacccgaccaccgcgttgagtccgaaggtggtcttattgaaacatggaactctcaacaccctgagctgcaatgcgccggtgtcactgtttccaaacgcaccctcaaccgcaacggcctccacttgccatcttactcaccttatccccaaatgatcattgtcgttcaaggtgcgtaatattagtaagaagtatttatcagcttaacgtgataacaataatagtaatatgaaatatttattaaatttttataattaatctctgctagaaaatttgattaatcattttagtagaatttgtttttctcaactaggtttttaaaacacca

SEQ ID NO: 4858 - DNA, 661 bp, Artificial
  Mutations within GlyA3B4 introduced by GmGlyA3B4_T03TALE nuclease
gttcatgtacggttgcagatataaacgaagcatagcttatgtatgaggtgtaacaaaattggaaacaatagccatgcaaggtgaagaatgtcaccaactcagaaacccttcttcattgacgtgtccctcactcactctcctctcttcactataaatcgccactcttcgtgttctccacttcaccaactccttcaaacttattaacactttccttagttcaatatggggaagcccttcttcactctctctctttcttccctttgcttgctactcttgtcgagtgcatgctttgctattacctccagcaagttagtgccaactcaacaacctcaacgcgttggaacccgaccaccgcgttgagtccgaaggtggtcttattgaaacatggaactctcacacctgagctgcaatgcgccggtgtcactgtttccaaacgcaccctcaaccgcaacggcctccacttgccatcttactcaccttatccccaaatgatcattgtcgttcaaggtgcgtaatattagtaagaagtatttatcagcttaacgtgataacaatatagtaatatgaaatatttattaaatttttataattaatctctgctagaaaatttgattaatcattttagtagaatttgttttctcaactaggttttaaaacacca

SEQ ID NO: 4859 - DNA, 659 bp, Artificial
  Mutations within GlyA3B4 introduced by GmGlyA3B4_T03TALE nuclease
gttcatgtacggttgcagatataaacgaagcatagcttatgtatgaggtgtaacaaaattggaaacaatagccatgcaaggtgaagaatgtcaccaactcagaaacccttcttcattgacgtgtccctcactcactctcctctcttcactataaatcgccactcttcgtgttctccacttcaccaactccttcaaacttattaacactttccttagttcaatatggggaagcccttcttcactctctctctttcttccctttgcttgctactcttgtcgagtgcatgctttgctattacctccagcaagttagtgccaactcaacaacctcaacgcgttggaacccgaccaccgcgttgagtccgaaggtggtcttattgaaacatggaactctcaacaccctgagctgcaatgcgccggtgtcactgtttccaaacgcaccctcaaccgcaacggcctccacttgccatcttactcaccttatccccaaatgatcattgtcgttcaaggtgcgtaatattagtaagaagtatttatcagcttaacgtgataacaataatagtaatatgaaatatttattaaatttttataattaatctctgctagaaaatttgattaatcattttagtagaatttgttttctcaactaggttttaaaa

SEQ ID NO: 4860 - DNA, 659 bp, Artificial
  Mutations within GlyA3B4 introduced by GmGlyA3B4_T03TALE nuclease
gttcatgtacggttgcagatataaacgaagcatagcttatgtatgaggtgtaacaaaattggaaacaatagccatgcaaggtgaagaatgtcaccaactcagaaacccttcttcattgacgtgtccctcactcactctcctctcttcactataaatcgccactcttcgtgttctccacttcaccaactccttcaaacttattaacactttccttagttcaatatggggaagcccttcttcactctctctctttcttccctttgcttgctactcttgtcgagtgcatgctttgctattacctccagcaaggtgccaactcaacaacctcaacgcgttggaacccgaccaccgcgttgagtccgaaggtggtcttattgaacatggaactctcaacaccctgagctgcaatgcgccggtgtcactgtttccaacgcaccctcaaccgcaacggcctccacttgccatcttactcaccttatccccaaatgatcattgtcgttcaaggtgcgtaatattagtaagaagtatttatcagcttaacgtgataacaatatagtaatatgaaatatttattaaatttttataattaatctctgctagaaaatttgattaatcattttagtagaatttgttttctcaactaggtttttaaaacacca

SEQ ID NO: 4861 - DNA, 646 bp, Artificial
  Mutations within GlyA3B4 introduced by GmGlyA3B4_T03TALE nuclease
gttcatgtacggttgcagatataaacgaagcatagcttatgtatgaggtgtaacaaaattggaaacaatagccatgcaaggtgaagaatgtcaccaactcagaaacccttcttcattgacgtgtccctcactcactctcctctcttcactataaatcgccactcttcgtgttctccacttcaccaactccttcaaacttattaacactttccttagttcaatatggggaagcccttcttcactctctctctttcttccctttgcttgctactcttgtcgagtgcatgctttgctattacctccagcaagtgagtgccaactcaacaacctcaacgcgttggaacccgaccaccgcgttgagtccgaaggtggtcttattgaaacatggaactctcaacaccctgagctgcaatgcgccggtgtcactgtttccaaacgcaccctcaaccgcaacggcctccacttgccatcttactcaccttatccccaaatgatcattgtcgttcaaggtgcgtaatattagtaagaagtatttatcagcttaacgtgataacaataatagtaatatgaaatatttattaaatttttataattaatctctgctagaaaatttgattaatcattttagtagaatttgttttctcaa

SEQ ID NO: 4862 - DNA, 643 bp, Artificial
  Mutations within GlyA3B4 introduced by GmGlyA3B4_T03TALE nuclease
gttcatgtacggttgcagatataaacgaagcatagcttatgtatgaggtgtaacaaaattggaaacaatagccatgcaaggtgaagaatgtcaccaactcagaaacccttcttcattgacgtgtccctcactcactctcctctcttcactataaatcgccactcttcgtgttctccacttcaccaactccttcaaacttattaacactttccttagttcaatatggggaagcccttcttcactctctctctttcttccctttgcttgctactcttgtcgagtgcatgctttgctattacctccagcaagtttgccaactcaacaacctcaacgcgttggaacccgaccaccgcgttgagtccgaaggtggtcttattgaacatggaactctcaacaccctgagctgcaatgcgccggtgtcactgtttccaaacgcaccctcaaccgcaacggcctccacttgccatcttactcaccttatccccaaatgatcattgtcgttcaaggtgcgtaatattagtaagaagtatttatcagcttaacgtgataacaataatagtaatatgaaatatttattaaatttttataattaatctctgctagaaaatttgattaatcattttagtagaatttgttttctcaa

SEQ ID NO: 4863 - DNA, 542 bp, Artificial
  Mutations within GlyA3B4 introduced by GmGlyA3B4_T03TALE nuclease
gttcatgtacggttgcagatataaacgaagcatagcttatgtatgaggtgtaacaaaattggaaacaatagccatgcaaggtgaagaatgtcaccaactcagaaacccttcttcattgacgtgtccctcactcactctcctctcttcactataaatcgccactcttcgtgttctccacttcaccaactccttcaaacttattaacactttccttagttcaatatggggaagcccttcttcactctctctctttcttccctttgcttgctctcaacaccctgagctgcaatgcgccggtgtcactgtttccaaacgcaccctcaaccgcaacggcctccacttgccatcttactcaccttatccccaaatgatcattgtcgttcaaggtgcgtaatattagtaagaagtattttatcagcttaacgtgataacaataatagtaatatgaaatatttattaaattttttataattaatctctgctagaaaatttgattaatcatttttagtagaatttgtttttctcaactaggtttttaaaca

SEQ ID NO: 4864 - DNA, 543 bp, Artificial
  Mutations within GlyA3B4 introduced by GmGlyA3B4_T03TALE nuclease
gttcatgtacggttgcagatataaacgaagcatagcttatgtatgaggtgtaacaaaattggaaacaatagccatgcaaggtgaagaatgtcaccaactcagaaacccttcttcattgacgtgtccctcactcactctcctctcttcactataaatcgccactcttcgtgttctccacttcaccaactccttcaaacttattaacactttccttagttcaatatggggaagcccttcttcactctctcccttattgaaacatggaactctcaacaccctgagctgcaatgcgccggtgtcactgtttccaaacgcaccctcaaccgcaacggcctccacttgccatcttactcaccttatccccaaatgatcattgtcgttcaaggtgcgtaatattagtaagaagtatttatcagcttaacgtgataacaataatagtaatatgaaatatttattaaattttttataattaatctctgctagaaaatttgattaatcatttttagtagaatttgtttttctcaactaggtttttaaacacca

SEQ ID NO: 4865 - DNA, 525 bp, Artificial
  Mutations within GlyA3B4 introduced by GmGlyA3B4_T03TALE nuclease
gttcatgtacggttgcagatataaacgaagcatagcttatgtatgaggtgtaacaaaattggaaacaatagccatgcaaggtgaagaatgtcaccaactcagaaacccttcttcattgacgtgtccctcactcactctcctctcttcactataaatcgccactcttcgtgttctccacttcaccaactccttcaaacttattaacactttccttagttcaatatggggaagcccttcttattgaaacatggaactctcaacaccctgagctgcaatgcgccggtgtcactgtttccaaacgcaccctcaaccgcaacggcctccacttgccatcttactcaccttatccccaaatgatcattgtcgttcaaggtgcgtaatattagtaagaagtatttatcagcttaacgtgataacaataatagtaatatgaaatatttattaaattttttataattaatctctgctagaaaatttgattaatcatttttagtagaatttgtttttctcaactaggtttaaaca

SEQ ID NO: 4866 - DNA, 608 bp, Artificial
  Mutations within GlyA3B4 introduced by GmGlyA3B4_T03TALE nuclease
gttcatgtacggttgcagatataaacgaagcatagcttatgtatgaggtgtaacaaaattggaaacaatagccatgcaaggtgaagaatgtcaccaactcagaaacccttcttcattgacgtgtccctcactcactctcctctcttcactataaatcgccactcttcgtgttctccacttcaccaactccttcaaacttattaacactttccttagttcaatatggggaagcccttcttcactctctctctttcttccctttgccaactcaacaacctcaacgcgttggaacccgaccaccgcgttgagtccgaaggtggtcttattgaaacatggaactctcaacaccctgagctgcaatgcgccggtgtcactgtttccaaacgcaccctcaaccgcaacggcctccacttgccatcttactcaccttatccccaaatgatcattgtcgttcaaggtgcgtaatattagtaagaagtatttatcagcttaacgtgataacaataatagtaatatgaaatatttattaaattttttataattaatctctgctagaaaatttgatttaatcatttttagtagaatttgtttttctcaactaggttttt

SEQ ID NO: 4867 - DNA, 427 bp, Artificial; identical to SEQ ID NO: 4769
  Mutations within GlyA3B4 introduced by GmGlyA3B4_T03TALE nuclease

SEQ ID NO: 4868 - DNA, 491 bp, Artificial
  Mutations within GlyA3B4 introduced by GmGlyA3B4_T03TALE nuclease
gttcatgtacggttgcagatataaacgaagcatagcttatgtatgaggtgtaacaaaattggaaacaatagccatgcaaggtgaagaatgtcaccaactcagaaacccttcttcattgacgtgtccctcactcactctcctctcttcactataaatcgccactcttcgtgttctccacttcaccaactccttcaaacttattaacactttccttagttcaatatggggaagcccttcttcactctctctctttcttccctttgcttgctactcttgtcgagtgcatgctttgctattacctccagcaagttcaacaccctgagctgcaatgcgccggtgtcactgtttccaaacgcaccctcaaccgcaacggcctccacttgccatcttactcaccttatccccaaatgatcattgtcgttcaaggtgcgtaatattagtaagaagtatttatcagcttaacgtgataacaataatagtaatatgaaata

SEQ ID NO: 4869 - DNA, 414 bp, Artificial
  Mutations within GlyA3B4 introduced by GmGlyA3B4_T03TALE nuclease
gttcatgtacggttgcagatataaacgaagcatagcttatgtatgaggtgtaacaaaattggaaacaatagccatgcaaggtgaagaatgtcaccaactcaacaacctcaacgcgttggaacccgaccaccgcgttgagtccgaaggtggtcttattgaaacatggaactctcaacaccctgagctgcaatgcgccggtgtcactgtttccaaacgcaccctcaaccgcaacggcctccacttgccatcttactcaccttatcccccaaatgatcattgtcgttcaaggtgcgtaatattagtaagaagtatttatcagcttaacgtgataacaataatagtaatatgaaatatttattaaattttttataattaatctctgctagaaaatttgattaatcatttttagtagaa

SEQ ID NO: 4870 - DNA, 593 bp, Artificial
  Mutations within GlyA3B4 introduced by GmGlyA3B4_T03TALE nuclease
gttcatgtacggttgcagatataaacgaagcatagcttatgtatgaggtgtaacaaaattggaaacaatagccatgcaaggtgaagaatgtcaccaactcagaaacccttcttcattgacgtgtccctcactcactctcctctcttcactataaatcgccactcttcgtgttctccacttcaccaactccttcaaacttattaacactttccttagttcaatatggggaagcccttcttcactctctctctttcttccctttgcttgctactcttgtcgagtgcatgctttgctattacctccagcaagttcgaaggtggtcttattgaaacatggaactctcaacaccctgagctgcaatgcgccggtgtcactgtttccaaacgcaccctcaaccgcaacggcctccacttgccatcttactcaccttatccccaaatgatcattgtcgttcaaggtgcgtaatattagtaagaagtatttatcagcttaacgtgataacaataatagtaatatgaatattattaaatttttatattaatctctgctagaaaatttgattaatcatttttagtagaatttgtttttctcaa

SEQ ID NO: 4871 - DNA, 647 bp, Artificial
  Mutations within GlyA3B4 introduced by GmGlyA3B4_T03TALE nuclease
gttcatgtacggttgcagatataaacgaagcatagcttatgtatgaggtgtaacaaaattggaaacaatagccatgcaaggtgaagaatgtcaccaactcagaaacccttcttcattgacgtgtccctcactcactctcctctcttcactataaatcgccactcttcgtgttctccacttcaccaactccttcaaacttattaacactttccttagttcaatatggggaagcccttcttcactctctctctttcttccctttgcttgctactcttgtcgagtgcatgctttgctattacctccagcaagttcagtgccaactcaacaacctcaacgcgttggaacccgaccaccgcgttgagtccgaaggtggtcttattgaaacatggaactctcaacaccctgagctgcaatgcgccggtgtcactgtttccaaacgcaccctcaaccgcaacggcctccacttgccatcttactcaccttatccccaaatgatcattgtcgttcaaggtgcgtaatattagtaagaagtatttatcagcttaacgtgataacaatatagtaatatgaaatatttattaaatttttataattaatctctgctagaaaatttgattaatcattttagtagaatttgttttctcaac

SEQ ID NO: 4872 - DNA, 599 bp, Artificial; identical to SEQ ID NO: 2087
  Mutations within GlyA3B4 introduced by GmGlyA3B4_T03TALE nuclease

SEQ ID NO: 4873 - DNA, 646 bp, Artificial; identical to SEQ ID NO: 4811
  Mutations within GlyA3B4 introduced by GmGlyA3B4_T03TALE nuclease

SEQ ID NO: 4874 - DNA, 660 bp, Artificial
  Mutations within GlyA3B4 introduced by GmGlyA3B4_T03TALE nuclease
gttcatgtacggttgcagatataaacgaagcatagcttatgtatgaggtgtaacaaaattggaaacaatagccatgcaaggtgaagaatgtcaccaactcagaaacccttcttcattgacgtgtccctcactcactctcctctcttcactataaatcgccactcttcgtgttctccacttcaccaactccttcaaacttattaacactttccttagttcaatatggggaagcccttcttcactctctctctttcttccctttgcttgctactcttgtcgagtgcatgctttgctattacctccagcaagtgccaactcaacaacctcaacgcgttggaacccgaccaccgcgttgagtccgaaggtggtcttattgaaacatggaactctcaacaccctgagctgcaatgcgccggtgtcactgtttccaaacgcaccctcaaccgcaacggcctccacttgccatcttactcaccttatccccaaatgatcattgtcgttcaaggtgcgtaatattagtaagaagtatttatcagcttaacgtgataacaataatagtaatatgaaatatttattaaatttttataattaatctctgctagaaaatttgattaatcattttagtagaatttgttttctcaactaggttttaaaacacca

SEQ ID NO: 4875 - DNA, 503 bp, Artificial
  Mutations within GlyA3B4 introduced by GmGlyA3B4_T03TALE nuclease
gttcatgtacggttgcagatataaacgaagcatagcttatgtatgaggtgtaacaaaattggaaacaatagccatgcaaggtgaagaatgtcaccaactcagaaacccttcttcattgacgtgtccctcactcactctcctctcttcactataaatcgccagtgccaactcaacaacctcaacgcgttggaacccgaccaccgcgttgagtccgaaggtggtcttattgaaacatggaactctcaacaccctgagctgcaatgcgccggtgtcactgtttccaaacgcaccctcaaccgcaacggcctccacttgccatcttactcaccttatccccaaatgatcattgtcgttcaaggtgcgtaatattagtaagaagtatttatcagcttaacgtgataacaataatagtaatatgaaatatttattaaattttttataattaatctctgctagaaaatttgattaatcatttttagtagaatttgtttttctcaactagg

SEQ ID NO: 4876 - DNA, 597 bp, Artificial
  Mutations within GlyA3B4 introduced by GmGlyA3B4_T03TALE nuclease
gttcatgtacggttgcagatataaacgaagcatagcttatgtatgaggtgtaacaaaattggaaacaatagccatgcaaggtgaagaatgtcaccaactcagaaacccttcttcattgacgtgtccctcactcactctcctctcttcactataaatcgccactcttcgtgttctccacttcaccaactccttcaaacttattaacactttccttagttcaatatggggaagcccttcttcactctctctctttcttccctttgcttgctactcttgtcgagtgcatgctttgctattacctccagcaagttcgaaggtggtcttattgaaacatggaactctcaacaccctgagctgcaatgcgccggtgtcactgtttccaaacgcaccctcaaccgcaacggcctccacttgccatcttactcaccttatccccaaatgatcattgtcgttcaaggtgcgtaatattagtaagaagtatttatcagcttaacgtgataacaataatagtaatatgaaatattattaaattttttataattaatctctgctagaaaatttgattaatcatttttagtagaatttgtttttctcaac

SEQ ID NO: 4877 - DNA, 499 bp, Artificial; identical to SEQ ID NO: 4828
  Mutations within GlyA3B4 introduced by GmGlyA3B4_T03TALE nuclease

SEQ ID NO: 4878 - DNA, 500 bp, Artificial
  Mutations within GlyA3B4 introduced by GmGlyA3B4_T03TALE nuclease
gttcatgtacggttgcagatataaacgaagcatagcttatgtatgaggtgtaacaaaattggaaacaatagccatgcaaggtgaagaatgtcaccaactcagaaacccttcttcattgacgtgtccctcactcactctcctctctgccaactcaacaacctcaacgcgttggaacccgaccaccgcgttgagtccgaaggtggtcttattgaaacatggaactctcaacaccctgagctgcaatgcgccggtgtcactgtttccaaacgcaccctcaaccgcaacggcctccacttgccatcttactcaccttatccccaaatgatcattgtcgttcaaggtgcgtaatattagtaagaagtatttatcagcttaacgtgataacaataatagtaatatgaaatattttattaaattttttataattaatctctgctagaaaatttgattaatcatttttagtagaatttgtttttctcaactaggttttaaacaccaca

SEQ ID NO: 4879 - DNA, 636 bp, Artificial
  Mutations within GlyA3B4 introduced by GmGlyA3B4_T03TALE nuclease
  misc_feature (532): n is a or c or t or g
gttcatgtacggttgcagatataaacgaagcatagcttatgtatgaggtgtaacaaaattggaaacaatagccatgcaaggtgaagaatgtcaccaactcagaaacccttcttcattgacgtgtccctcactcactctcctctcttcactataaatcgccactcttcgtgttctccacttcaccaactccttcaaacttattaacactttccttagttcaatatggggaagcccttcttcactctctctctttcttccctttgcttgctactcttgtcgagtgcatgctttgctattacctccagcaagttcgagtgccaactcaacaacctcaacgcgttggaacccgaccaccgcgttgagtccgaaggtggtcttattgaaacatggaactctcaacaccctgagctgcaatgcgccggtgtcactgtttccaaacgcaccctcaaccgcaacggcctccacttgccatcttactcaccttatccccaaatgatcattgtcgttcaaggtgcgtaatattagtaagagnatttatcagcttaacgtgatacaatatagtaatatgaaatatttattaaatttttataattaatctctgctagaaaatttgattaatcattttagtagaatttg

SEQ ID NO: 4880 - DNA, 494 bp, Artificial
  Mutations within GlyA3B4 introduced by GmGlyA3B4_T03TALE nuclease
gttcatgtacggttgcagatataaacgaagcatagcttatgtatgaggtgtaacaaaattggaaacaatagccatgcaaggtgaagaatgtcaccaactcagaaacccttcttcattgacgtgtccctcactcactctcctctcttcactataaatcgccactcttcgtgttctccacttcaccaactccgaaggtggtcttattgaaacatggaactctcaacaccctgagctgcaatgcgccggtgtcactgtttccaaacgcaccctcaaccgcaacggcctccacttgccatcttactcaccttatccccaaatgatcattgtcgttcaaggtgcgtaatattagtaagaagtatttatcagcttaacgtgataacaataatagtaatatgaaatatttattaaattttttataattaatctctgctagaaaatttgattaatcatttttagtagaatttgtttttctcaactaggttttaaacaccaca

SEQ ID NO: 4881 - DNA, 659 bp, Artificial
  Mutations within GlyA3B4 introduced by GmGlyA3B4_T03TALE nuclease
gttcatgtacggttgcagatataaacgaagcatagcttatgtatgaggtgtaacaaaattggaaacaatagccatgcaaggtgaagaatgtcaccaactcagaaacccttcttcattgacgtgtccctcactcactctcctctcttcactataaatcgccactcttcgtgttctccacttcaccaactccttcaaacttattaacactttccttagttcaatatggggaagcccttcttcactctctctctttcttccctttgcttgctactcttgtcgagtgcatgctttgctattacctccagcaagccaactcaacaacctcaacgcgttggaacccgaccaccgcgttgagtccgaaggtggtcttattgaaacatggaactctcaacaccctgagctgcaatgcgccggtgtcactgtttccaaacgcaccctcaaccgcaacggcctccacttgccatcttactcaccttatccccaaatgatcattgtcgttcaaggtgcgtaatattagtaagaagtatttatcagcttaacgtgataacaatatagtaatatgaaatatttattaaatttttataattaatctctgctagaaaatttgattaatcattttagtagaatttgtttttctcaactaggtttttaaaacacca

SEQ ID NO: 4882 - DNA, 659 bp, Artificial
  Mutations within GlyA3B4 introduced by GmGlyA3B4_T03TALE nuclease
gttcatgtacggttgcagatataaacgaagcatagcttatgtatgaggtgtaacaaaattggaaacaatagccatgcaaggtgaagaatgtcaccaactcagaaacccttcttcattgacgtgtccctcactcactctcctctcttcactataaatcgccactcttcgtgttctccacttcaccaactccttcaaacttattaacactttccttagttcaatatggggaagcccttcttcactctctctctttcttccctttgcttgctactcttgtcgagtgcatgctttgctattacctccagcaagttcaagtgccaactcaacaacctcaacgcgttggaacccgaccaccgcgttgagtccgaaggtgtcttattgaaacatggaactctcaacaccctgagctgcaatgcgccggtgtcactgtttccaaacgcaccctcaaccgcaacggcctccacttgccatcttactcaccttatccccaaatgatcattgtcgttcaaggtgcgtaatattagtaagaagtatttatcagcttaacgtgataacaataatagtaatatgaaatatttattaaatttttataattaatctctgctagaaaatttgattaatcattttagtagaatttgttttctcaactaggttttaaa

SEQ ID NO: 4883 - DNA, 632 bp, Artificial
  Mutations within GlyA3B4 introduced by GmGlyA3B4_T03TALE nuclease
gttcatgtacggttgcagatataaacgaagcatagcttatgtatgaggtgtaacaaaattggaaacaatagccatgcaaggtgaagaatgtcaccaactcagaaacccttcttcattgacgtgtccctcactcactctcctctcttcactataaatcgccactcttcgtgttctccacttcaccaactccttcaaacttattaacactttccttagttcaatatggggaagcccttcttcactctctctctttcttccctttgcttgctactcttctcgagtgcatgctttgccaactcaacaacctcaacgcgttggaacccgaccaccgcgttgagtccgaaggtggtcttattgaaacatggaactctcaacaccctgagctgcaatgcgccggtgtcactgtttccaaacgcaccctcaaccgcaacggcctccacttgccatcttactcaccttatccccaaatgatcattgtcgttcaaggtgcgtaatattagtaagaagtatttatcagcttaacgtgataacaataatagtaatatgaaatatttattaaattttttataattaatctctgctagaaaatttgattaatcatttttagtagaatttgttttttctcaactagg

SEQ ID NO: 4884 - DNA, 660 bp, Artificial
  Mutations within GlyA3B4 introduced by GmGlyA3B4_T03TALE nuclease
gttcatgtacggttgcagatataaacgaagcatagcttatgtatgaggtgtaacaaaattggaaacaatagccatgcaaggtgaagaatgtcaccaactcagaaacccttcttcattgacgtgtccctcactcactctcctctcttcactataaatcgccactcttcgtgttctccacttcaccaactccttcaaacttattaacactttccttagttcaatatggggaagcccttcttcactctctctctttcaagccgtgggcctggcacagcaccggcaacagccgctggaccgtctccagcgcctgcttgccaccgccattgctggcgatggccaccgagtgccaactcaacaacctcaacgcgttggaaccccgaccaccgcgttgagtccgaaggtggtcttattgaaacatggaactctcaacaccctgagctgcaatgcgccggtgtcactgtttccaaacgcaccctcaaccgcaacggcctccacttgccatcttactcaccttatccccaaatgatcattgtcgttcaaggtgcgtaatattagtaagaagtatttatcagcttaacgtgataacaataatagtaatatgaaatatttattaaatttttataattaatctctgctagaaaatttgattaatcattttta

SEQ ID NO: 4885 - DNA, 662 bp, Artificial
  Mutations within GlyA3B4 introduced by GmGlyA3B4_T03TALE nuclease
gttcatgtacggttgcagatataaacgaagcatagcttatgtatgaggtgtaacaaaattggaaacaatagccatgcaaggtgaagaatgtcaccaactcagaaacccttcttcattgacgtgtccctcactcactctcctctcttcactataaatcgccactcttcgtgttctccacttcaccaactccttcaaacttattaacactttccttagttcaatatggggaagcccttcttcactctctctctttcttccctttgcttgctactcttgtcgagtgcatgctttgctattacctccagcaagttgtgccaactcaacaacctcacgcgttggaacccgaccaccgcgttgagtccgaaggtggtcttattgaaacatggaactctcaacaccctgagctgcaatgcgccggtgtcactgtttccaaacgcaccctcaaccgcaacggcctccacttgccatcttactcaccttatccccaaatgatcattgtcgttcaaggtgcgtaatattagtaagaagtatttatcagcttaacgtgataacaataatagtaatatgaaatatttattaaatttttataattaatctctgctagaaaatttgattaatcattttagtagaatttgttttctcaactaggttttaaaacacca

SEQ ID NO: 4886 - DNA, 664 bp, Artificial
  Mutations within GlyA3B4 introduced by GmGlyA3B4_T03TALE nuclease
gttcatgtacggttgcagatataaacgaagcatagcttatgtatgaggtgtaacaaaattggaaacaatagccatgcaaggtgaagaatgtcaccaactcagaaacccttcttcattgacgtgtccctcactcactctcctctcttcactataaatcgccactcttcgtgttctccacttcaccaactccttcaaacttattaacactttccttagttcaatatggggaagcccttcttcactctctctctttcttccctttgcttgctactcttgtcgagtgcatgctttgctattacctccagcaagttcatgccaactcaacaacctcaacgcgttggaacccgaccaccgcgttgagtccgaaggtggtcttattgaaacatggaactctcaacaccctgagctgcaatgcgccggtgtcactgtttccaaacgcaccctcaaccgcaacggcctccacttgccatcttactcaccttatccccaaatgatcattgtcgttcaaggtgcgtaatattagtaagaagtatttatcagcttaacgtgataacaataatagtaatatgaaatatttattaaatttttataattaatctctgctagaaaatttgattaatcattttagtagaatttgttttctcaactaggttttaaaacacca

SEQ ID NO: 4887 - DNA, 645 bp, Artificial
  Mutations within GlyA3B4 introduced by GmGlyA3B4_T03TALE nuclease
gttcatgtacggttgcagatataaacgaagcatagcttatgtatgaggtgtaacaaaattggaaacaatagccatgcaaggtgaagaatgtcaccaactcagaaacccttcttcattgacgtgtccctcactcactctcctctcttcactataaatcgccactcttcgtgttctccacttcaccaactccttcaaacttattaacactttccttagttcaatatggggaagcccttcttcactctctctctttcttccctttgcttgctactcttgtcgagtgcatgctttgctattacctccagcaagttagtgccaactcaacaacctcaacgcgttggaacccgaccaccgcgttgagtccgaaggtggtcttattgaaacatggaactctcaacaccctgagctgcaatgcgccggtgtcactgtttccaaacgcaccctcaaccgcaacggcctccacttgccatcttactcaccttatccccaaatgatcattgtcgttcaaggtgcgtaatattagtaagaagtatttatcagcttaacgtgataacaatatagtaatatgaaatatttattaaatttttataattaatctctgctagaaaatttgattaatcattttagtagaatttgttttctcaa

SEQ ID NO: 4888 - DNA, 643 bp, Artificial
  Mutations within GlyA3B4 introduced by GmGlyA3B4_T03TALE nuclease
gttcatgtacggttgcagatataaacgaagcatagcttatgtatgaggtgtaacaaaattggaaacaatagccatgcaaggtgaagaatgtcaccaactcagaaacccttcttcattgacgtgtccctcactcactctcctctcttcactataaatcgccactcttcgtgttctccacttcaccaactccttcaaacttattaacactttccttagttcaatatggggaagcccttcttcactctctctctttcttccctttgcttgctactcttgtcgagtgcatgctttgctattacctccagcaagagtgccaactcaacaacctcaacgcgttggaacccgaccaccgcgttgagtccgaaggtggtcttattgaaacatggaactctcaacaccctgagctgcaatgcgccggtgtcactgtttccaaacgcaccctcaaccgcaacggcctccacttgccatcttactcaccttatccccaaatgatcattgtcgttcaaggtgcgtaatattagtaagaagtatttatcagcttaacgtgataacaatatagtaatatgaaatatttattaaatttttataattaatctctgctagaaaatttgattaatcattttagtagaatttgttttctcaa

SEQ ID NO: 4889 - DNA, 633 bp, Artificial
  Mutations within GlyA3B4 introduced by GmGlyA3B4_T03TALE nuclease
gttcatgtacggttgcagatataaacgaagcatagcttatgtatgaggtgtaacaaaattggaaacaatagccatgcaaggtgaagaatgtcaccaactcagaaacccttcttcattgacgtgtccctcactcactctcctctcttcactataaatcgccactcttcgtgttctccacttcaccaactccttcaaacttattaacactttccttagttcaatatggggaagcccttcttcactctctctctttcttccctttgcttgctactcttgtcgagtgcatgctttgctattacctccagcaagttgccaactcaacaacctcaacgcgttggaaccgaccaccgcgttgagtccgaaggtggtcttattgaaacatggaactctcaacaccctgagctgcaatgcgccggtgtcactgtttccaaacgcaccctcaaccgcaacggcctccacttgccatcttactcaccttatccccaaatgatcattgtcgttcaaggtgcgtaatattagtaagaagtatttatcagcttaacgtgataacaataatagtaatatgaaatatttattaaatttttataattaatctctgctagaaaatttgattaatcattttagtagaatttg

SEQ ID NO: 4890 - DNA, 647 bp, Artificial
  Mutations within GlyA3B4 introduced by GmGlyA3B4_T03TALE nuclease
gttcatgtacggttgcagatataaacgaagcatagcttatgtatgaggtgtaacaaaattggaaacaatagccatgcaaggtgaagaatgtcaccaactcagaaacccttcttcattgacgtgtccctcactcactctcctctcttcactataaatcgccactcttcgtgttctccacttcaccaactccttcaaacttattaacactttccttagttcaatatggggaagcccttcttcactctctctctttcttccctttgcttgctactcttgtcgagtgcatgctttgctattacctccagcaagttcaacgagtgaaacccgaccaccgcgttgagtccgaaggtggtcttattgaaacatggaactctcaacacctgagctgcaatgcgccggtgtcactgtttccaaacgcaccctcaaccgcaacggcctccacttgccatcttactcaccttatccccaaatgatcattgtcgttcaaggtgcgtaatattagtaagaagtatttatcagcttaacgtgataacaataatagtaatatgaaatatttattaaatttttataattaatctctgctagaaaatttgattaatcatttttagtagaatttgttttttctcaactaggttttaaacaccaca

SEQ ID NO: 4891 - DNA, 607 bp, Artificial
  Mutations within GlyA3B4 introduced by GmGlyA3B4_T03TALE nuclease
gttcatgtacggttgcagatataaacgaagcatagcttatgtatgaggtgtaacaaaattggaaacaatagccatgcaaggtgaagaatgtcaccaactcagaaacccttcttcattgacgtgtccctcactcactctcctctcttcactataaatcgccactcttcgtgttctccacttcaccaactccttcaaacttattaacactttccttagttcaatatggggaagcccttcttcactctctctctttcttccctttgcttgctactcttgtcgagtgcatgctttgctattacctccagcaatgcgccgcgttgagtccgaaggtggtcttattgaaacatggaactctcaacaccctgagctgcaatgcgccggtgtcactgtttccaaaacgcaccctcaaccgcaacggcctccacttgccatcttactcaccttatccccaaatgatcattgtcgttcaaggtgcgtaatattagtaagaagtatttatcagcttaacgtgataacaataatagtaatatgaaatatttattaaatttttataattaatctctgctagaaaatttgattaatcatttttagtagaaatttgtttttc

SEQ ID NO: 4892 - DNA, 636 bp, Artificial
  Mutations within GlyA3B4 introduced by GmGlyA3B4_T03TALE nuclease
gttcatgtacggttgcagatataaacgaagcatagcttatgtatgaggtgtaacaaaattggaaacaatagccatgcaaggtgaagaatgtcaccaactcagaaacccttcttcattgacgtgtccctcactcactctcctctcttcactataaatcgccactcttcgtgttctccacttcaccaactccttcaaacttattaacactttccttagttcaatatggggaagcccttcttcactctctctctttcttccctttgcttgctactcttgtcgagtgcatgctttgctattacctcaacgcgttggaacccgaccaccgcgttgagtccgaaggtggtcttattgaaacatggaactctcaacaccctgagctgcaatgcgccggtgtcactgtttccaaacgcaccctcaaccgcaacggcctccacttgccatcttactcaccttatccccaaatgatcattgtcgttcaaggtgcgtaatattagtaagaagtatttatcagcttaacgtgataacaataatagtaatatgaaatatttattaaattttttataattaatctctgctagaaaatttgattaatcatttttagtagaatttgttttttctcaactaggttttaaaaca

SEQ ID NO: 4893 - DNA, 657 bp, Artificial
  Mutations within GlyA3B4 introduced by GmGlyA3B4_T03TALE nuclease
gttcatgtacggttgcagatataaacgaagcatagcttatgtatgaggtgtaacaaaattggaaacaatagccatgcaaggtgaagaatgtcaccaactcagaaacccttcttcattgacgtgtccctcactcactctcctctcttcactataaatcgccactcttcgtgttctccacttcaccaactccttcaaacttattaacactttccttagttcaatatggggaagcccttcttcactctctctctttcttccctttgcttgctactcttgtcgagtgcatgctttgctattacctccgagtcagttgagtgccaactcaacaacctcaacgcgttggaacccgaccaccgcgttgagtccgaaggtggtcttattgaaacatggaactctcaacaccctgagctgcaatgcgccggtgtcactgtttccaaacgcaccctcaaccgcaacggcctccacttgccatcttactcaccttatccccaaatgatcattgtcgttcaaggtgcgtaatattagtaagaagtatttatcagcttaacgtgataacaataatagtaatatgaaatatttattaaatttttataattaatctctgctagaaaatttgattaatcattttagtagaatttgttttctcaactaggtttt

SEQ ID NO: 4894 - DNA, 626 bp, Artificial
  Mutations within GlyA3B4 introduced by GmGlyA3B4_T03TALE nuclease
gttcatgtacggttgcagatataaacgaagcatagcttatgtatgaggtgtaacaaaattggaaacaatagccatgcaaggtgaagaatgtcaccaactcagaaacccttcttcattgaccgtgtccctcactcactcatcctctcttcactataaatcgccactcttcgtgttctccacttcaccaactccttcaaacttattaacactttccttagttcaatatggggaagcccttcttcactctctctctttcttccctttgcttgctactcttgtcgagtgcatgctttgctattacctccagcaagttcagtgccaactcaacaacctcaacgcgttggaacccgaccaccgcgttgagtccgaaggtggtcttattgaaacatggaactctcaacaccctgagctgcaatgcgccggtgtcactgtttccaaaacgcaccctcaaccgcaacggcctccacttgccatcttactcaccttatccccaaatgatcattgtcgttcaaggtgcgtaatattagtaagaagtatttatcagcttaacgtgataacaataatagtaatatgaaatatttattaaatttttataattaatctctgctagaaaatttgattaatca

SEQ ID NO: 4895 - DNA, 654 bp, Artificial
  Mutations within GlyA3B4 introduced by GmGlyA3B4_T03TALE nuclease
gttcatgtacggttgcagatataaacgaagcatagcttatgtatgaggtgtaacaaaattggaaacaatagccatgcaaggtgaagaatgtcaccaactcagaaacccttcttcattgacgtgtccctcactcactctcctctcttcactataaatcgccactcttcgtgttctccacttcaccaactccttcaaacttattaacactttccttagttcaatatggggaagcccttcttcactctctctctttcttccctttgcttgctactcttgtcgagtgcatgctttgctattacctctgccaactcaacaacctcaacgcgttggaacccgaccaccgcgttgagtccgaaggtggtcttattgaaacatggaactctcaacaccctgagctgcaatgcgccggtgtcactgtttccaaacgcaccctcaaccgcaacggcctccacttgccatcttactcaccttatccccaaatgatcattgtcgttcaaggtgcgtaatattagtaagaagtatttatcagcttaacgtgataacaataatagtaatatgaaatatttattaaatttttataattaatctctgctagaaaatttgattaatcattttagtagaatttgtttttctcaactaggttttaaaacacca

SEQ ID NO: 4896 - DNA, 636 bp, Artificial
  Mutations within GlyA3B4 introduced by GmGlyA3B4_T03TALE nuclease
gttcatgtacggttgcagatataaacgaagcatagcttatgtatgaggtgtaacaaaattggaaacaatagccatgcaaggtgaagaatgtcaccaactcagaaacccttcttcattgacgtgtccctcactcactctcctctcttcactataaatcgccactcttcgtgttctccacttcaccaactccttcaaacttattaacactttccttagttcaatatggggaagcccttcttcactctctctctttcttccctttgcttgctactcttgtcgagtgcatgctttgccaactcaacaacctcaacgcgttggaacccgaccaccgcgttgagtccgaaggtggtcttattgaaacatggaactctcaacaccctgagctgcaatgcgccggtgtcactgttttccaaacgcaccctcaaccgcaacggcctccacttgccatcttactcaccttatcccccaaatgatcattgtcgttcaaggtgcgtaatattagtaagaagtatttatcagcttaacgtgataacaataatagtaatatgaaatatttattaaattttttataaattaattctctgctagaaaatttgattaatcatttttagtagaatttgttttttctcaactagg

SEQ ID NO: 4897 - DNA, 648 bp, Artificial
  Mutations within GlyA3B4 introduced by GmGlyA3B4_T03TALE nuclease
gttcatgtacggttgcagatataaacgaagcatagcttatgtatgaggtgtaacaaaattggaaacaatagccatgcaaggtgaagaatgtcaccaactcagaaacccttcttcattgacgtgtccctcactcactctcctctcttcactataaatcgccactcttcgtgttctccacttcaccaactccttcaaacttattaacactttccttagttcaatatggggaagcccttcttcactctctctctttcttccctttgcttgctactcttgtcgagtgcatgctttgctattacctccagcaagccaactcaacaacctcaacgcgttggaacccgaccaccgcgttgagtccgaaggtggtcttattgaaacatggaactctcaacaccctgagctgcaatgcgccggtgtcactgtttccaaacgcaccctcaaccgcaacggcctccacttgccatcttactcaccttatccccaaatgatcattgtcgttcaaggtgcgtaatattagtaagaagtatttatcagcttaacgtgataacaatatagtaatatgaaatatttattaaatttttataattaatctctgctagaaaatttgattaatcattttagtagaatttgttttctcaactaggtttt

SEQ ID NO: 4898 - DNA, 631 bp, Artificial
  Mutations within GlyA3B4 introduced by GmGlyA3B4_T03TALE nuclease
gttcatgtacggttgcagatataaacgaagcatagcttatgtatgaggtgtaacaaaattggaaacaatagccatgcaaggtgaagaatgtcaccaactcagaaacccttcttcattgacgtgtccctcactcactctcctctcttcactataaatcgccactcttcgtgttctccacttcaccaactccttcaaacttattaacactttccttagttcaatatggggaagcccttcttcactctctctctttcttccctttgcttgctactcttgtcgagtgcatgctttgctattacctccagcaagccaactcaacaacctcaacgcgttggaacccgaccaccgcgttgagtccgaaggtggtcttattgaaacatggaactctcaacaccctgagctgcaatgcgccggtgtcactgtttccaaacgcaccctcaaccgcaacggcctccacttgccatcttactcaccttatccccaaatgatcattgtcgttcaaggtgcgtaatattagtaagaagtatttatcagcttaacgtgataacaataatagtaatatgaaatatttattaaatttttataattaatctctgctagaaaatttgattaatcattttagtagaatttg

SEQ ID NO: 4899 - DNA, 630 bp, Artificial
  Mutations within GlyA3B4 introduced by GmGlyA3B4_T03TALE nuclease
gttcatgtacggttgcagatataaacgaagcatagcttatgtatgaggtgtaacaaaattggaaacaatagccatgcaaggtgaagaatgtcaccaactcagaaacccttcttcattgacgtgtccctcactcactctcctctcttcactataaatcgccactcttcgtgttctccacttcaccaactccttcaaacttattaacactttccttagttcaatatggggaagcccttcttcactctctctctttcttccctttgcttgctactcttgtcgagtgcatgctttgctattacctcaacgcgttggaacccgaccaccgcgttgagtccgaaggtggtcttattgaaacatggaactctcaacaccctgagctgcaatgcgccggtgtcactgtttccaaacgcaccctcaaccgcaacggcctccacttgccatcttactcaccttatccccaaatgatcattgtcgttcaaggtgcgtaatattagtaagaagtatttatcagcttaacgtgataacaataatagtaatatgaaatatttattaaattttttataattaatctctgctagaaaatttgattaatcatttttagtagaatttgttttttctcaactaggtttt

SEQ ID NO: 4900 - DNA, 470 bp, Artificial
  Mutations within GlyA3B4 introduced by GmGlyA3B4_T03TALE nuclease
gttcatgtacggttgcagatataaacgaagcatagcttatgtatgaggtgtaacaaaattggaaacaatagccatgcaaggtgaagaatgtcaccaactcagaaacccttcttcattgacgtgtccctcactcactctcctctcttcactataaatcgccactcttcgtgttctccacttcaccaactccttcaaacttattaacactttccttagttcaatatggggaagcccttcttcactctctctctttcttccctttgcttgctactcttgtcgagtgcatgctttgctattacctccagcaagtcgtgcgtaatattagtaagaagtatttatcagcttaacgtgataacaataatagtaatatgaaatatttattaaattttttataattaatctctgctagaaaatttgattaatcatttttagtagaatttgtttttctcaacttaggtttttaaacacca

SEQ ID NO: 4901 - DNA, 470 bp, Artificial; identical to SEQ ID NO: 4900
  Mutations within GlyA3B4 introduced by GmGlyA3B4_T03TALE nuclease

SEQ ID NO: 4902 - DNA, 654 bp, Artificial
  Mutations within GlyA3B4 introduced by GmGlyA3B4_T03TALE nuclease
gttcatgtacggttgcagatataaacgaagcatagcttatgtatgaggtgtaacaaaattggaaacaatagccatgcaaggtgaagaatgtcaccaactcagaaacccttcttcattgacgtgtccctcactcactctcctctcttcactataaatcgccactcttcgtgttctccacttcaccaactccttcaaacttattaacactttccttagttcaatatggggaagcccttcttcactctctctctttcttccctttgcttgctactcttgtcgagtgcatgctttgctattacctccagcaagttagtgccaactcaacaacctcaacgcgttggaacccagaccaccgcgttgagtccgaaggtggtcttattgaacatggaactctcaacacctgagctgcaatgcgccggtgtcactgtttccaacgcacctcaaccgcaacggcctccacttgccatcttactcaccttatccccaaatgatcattgtcgttcaaggtgcgtaatattagtaagaagtatttatcagcttaacgtgataacaatatagtaatatgaaatatttattaaatttttataattaatctctgctagaaaatttgattaatcattttagtagaatttgttttctcaactaggttttaaa

SEQ ID NO: 4903 - DNA, 667 bp, Artificial
  Mutations within GlyA3B4 introduced by GmGlyA3B4_T03TALE nuclease
  misc_feature (403): n is a or c or t or g
gttcatgtacggttgcagatataaacgaagcatagcttatgtatgaggtgtaacaaaattggaaacaatagccatgcaaggtgaagaatgtcaccaactcagaaacccttcttcattgacgtgtccctcactcactctcctctcttcactataaatcgccactcttcgtgttctccacttcaccaactccttcaaacttattaacactttccttagttcaatatggggaagcccttcttcactctctctctttcttccctttgcttgctactcttgtcgagtgcatgctttgctattacctccagcaagttctgccaactcaacaacctcaacgcgttggaacccgaccaccgcgttgagtccgaaggtggtcttattgaaacatggaactctcaacaccctnagctgcaatgcgccggtgtcactgtttccaaacgcaccctcaccgcaacggcctccaacgttgccatcttcactcaccttatcccaactgaatcattgtcgttcaaaggtgcgtaatattagtaagaagtatttatcagcttaacgtgataacaataatagtaatatgaaatatttattaaatttttataattaatctctgctagaaaatttgattaatcattttagtagaatttgtttttctcaactaggttttaaaacacca

SEQ ID NO: 4904 - DNA, 626 bp, Artificial
  Mutations within GlyA3B4 introduced by GmGlyA3B4_T03TALE nuclease
gttcatgtacggttgcagatataaacgaagcatagcttatgtatgaggtgtaacaaaattggaaacaatagccatgcaaggtgaagaatgtcaccaactcagaaacccttcttcattgacgtgtccctcactcactctcctctcttcactataaatcgccactcttcgtgttctccacttcaccaactccttcaaacttattaacactttccttagttcaatatggggaagcccttcttcactctctctctttcttccctttgcttgctactcttgtcgagtgccaactcaacaacctcaacgcgttggaacccgaccaccgcgttgagtccgaaggtggtcttattgaaacatggaactctcaacaccctgagctgcaatgcgccggtgtcactgtttccaaacgcaccctcaaccgcaacggcctccacttgccatcttactcaccttatccccaaatgatcattgtcgttcaaggtgcgtaatattagtaagaagtatttatcagcttaacgtgataacaataatagtaatatgaaatatttattaattttttataattaatctctgctagaaaatttgattaatcatttttagtagaatttgtttttctcaactaggttttt

SEQ ID NO: 4905 - DNA, 643 bp, Artificial
  Mutations within GlyA3B4 introduced by GmGlyA3B4_T03TALE nuclease
gttcatgtacggttgcagatataaacgaagcatagcttatgtatgaggtgtaacaaaattggaaacaatagccatgcaaggtgaagaatgtcaccaactcagaaacccttcttcattgacgtgtccctcactcactctcctctcttcactataaatcgccactcttcgtgttctccacttcaccaactccttcaaacttattaacactttccttagttcaatatggggaagcccttcttcactctctctctttcttccctttgcttgctactcttgtcgagtgcatgctttgctattacctccagcaaagtgccaactcaacaacctcaacgcgttggaacccgaccaccgcgttgagtccgaaggtggtcttattgaaacatggaactctcaacaccctgagctgcaatgcgccggtgtcactgtttccaaacgcaccctcaaccgcaacggcctccacttgccatcttactcaccttatccccaaatgatcattgtcgttcaaggtgcgtaatattagtaagaagtatttatcagcttaacgtgataacaataatagtaatatgaaatatttattaaatttttataattaatctctgctagaaaatttgattaatcattttagtagaatttgttttctcaa

SEQ ID NO: 4906 - DNA, 644 bp, Artificial; identical to SEQ ID NO: 4836
  Mutations within GlyA3B4 introduced by GmGlyA3B4_T03TALE nuclease

SEQ ID NO: 4907 - DNA, 646 bp, Artificial
  Mutations within GlyA3B4 introduced by GmGlyA3B4_T03TALE nuclease
gttcatgtacggttgcagatataaacgaagcatagcttatgtatgaggtgtaacaaaattggaaacaatagccatgcaaggtgaagaatgtcaccaactcagaaacccttcttcattgacgtgtccctcactcactctcctctcttcactataaatcgccactcttcgtgttctccacttcaccaactccttcaaacttattaacactttccttagttcaatatggggaagcccttcttcactctctctctttcttccctttgcttgctactcttgtcgagtgcatgctttgctattacctccagcaagttagtgccaactcaacaacctcaacgcgttggaacccgaccaccgcgttgagtccgaaggtggtcttattgaaacatggaactctcaacaccctgagctgcaatgcgccggtgtcactgtttccaaacgcaccctcaaccgcaacggcctccacttgccatcttactcaccttatccccaaatgatcattgtcgttcaaggtgcgtaatattagtaagaagtatttatcagcttaacgtgataacaataatagtaatatgaaatatttattaaatttttataattaatctctgctagaaaatttgattaatcattttagtagaatttgttttctcaa

SEQ ID NO: 4908 - DNA, 469 bp, Artificial
  Mutations within GlyA3B4 introduced by GmGlyA3B4_T03TALE nuclease
gttcatgtacggttgcagatataaacgaagcatagcttatgtatgaggtgtaacaaaattggaaacaatagccatgcaaggtgaagaatgtcaccaactcagaaacccttcttcattgacgtgtccctcactcactctcctctcttcactataaatcgccactcttcgtgttctccacttcaccaactccttcaaacttattaacactttccttagttcaatatggggaagcccttcttcactctctctctttcttccctttgcttgctactcttgtcgagtgcatgctttgctattacctccagcaagtcgtgcgtaatattagtaagaagtatttatcagcttaacgtgataacaataatagtaatatgaaatatttattaaattttttataattaatctctgctagaaatttgattaatcatttttagtagaatttgtttttctcaacttaggtttttaaacacca

SEQ ID NO: 4909 - DNA, 663 bp, Artificial
  Mutations within GlyA3B4 introduced by GmGlyA3B4_T03TALE nuclease
gttcatgtacggttgcagatataaacgaagcatagcttatgtatgaggtgtaacaaaattggaaacaatagccatgcaaggtgaagaatgtcaccaactcagaaacccttcttcattgacgtgtccctcactcactctcctctcttcactataaatcgccactcttcgtgttctccacttcaccaactccttcaaacttattaacactttccttagttcaatatggggaagcccttcttcactctctctctttcttccctttgcttgctactcttgtcgagtgcatgctttgctattacctccagcaaagagtgccaactcaacaacctcaacgcgttggaacccgaccaccgcgttgagtccgaaggtggtcttattgaaacatggaactctcaacaccctgagctgcaatgcgccggtgtcactgtttccaaacgcaccctcaaccgcaacggcctccacttgccatcttactcaccttatccccaaatgatcattgtcgttcaaggtgcgtaatattagtaagaagtatttatcagcttaacgtgataacaataatagtaatatgaaatatttattaaatttttataattaatctctgctagaaaatttgattaatcattttagtagaatttgttttctcaactaggttttaaaacacca

SEQ ID NO: 4910 - DNA, 649 bp, Artificial
  Mutations within GlyA3B4 introduced by GmGlyA3B4_T03TALE nuclease
gttcatgtacggttgcagatataaacgaagcatagcttatgtatgaggtgtaacaaaattggaaacaatagccatgcaaggtgaagaatgtcaccaactcagaaacccttcttcattgacgtgtccctcactcactctcctctcttcactataaatcgccactcttcgtgttctccacttcaccaactccttcaaacttattaacactttccttagttcaatatggggaagcccttcttcactctctctctttcttccctttgcttgctactcttgtcgagtgcatgctttgctattacctccagcaaaaccaactcaacaacctcaacgcgttggaacccgaccaccgcgttgagtccgaaggtggtcttattgaaacatggaactctcaacaccctgagctgcaatgcgccggtgtcactgtttccaaacgcaccctcaaccgcaacggcctccacttgccatcttactcaccttatccccaaatgatcattgtcgttcaaggtgcgtaatattagtaagaagtatttatcagcttaacgtgataacaatatagtaatatgaaatatttattaaatttttataattaatctctgctagaaaatttgattaatcattttagtagaatttgttttctcaactaggtttt

SEQ ID NO: 4911 - DNA, 544 bp, Artificial
  Mutations within GlyA3B4 introduced by GmGlyA3B4_T03TALE nuclease
gttcatgtacggttgcagatataaacgaagcatagcttatgtatgaggtgtaacaaaattggaaacaatagccatgcaaggtgaagaatgtcaccaactcagaaacccttcttcattgacgtgtccctcactcactctcctctcttcactataaatcgccactcttcgtgttctccacttcaccaactccttcaaacttattaacactttccttagttcaatatgagtaagttggaacccgaccaccgcgttgagtccgaaggtggtcttattgaaacatggaactctcaacaccctgagctgcaatgcgccggtgtcactgtttccaaacgcaccctcaaccgcaacggcctccacttgccatcttactcaccttatccccaaatgatcattgtcgttcaaggtgcgtaatattagtaagaagtatttatcagcttaacgtgataacaataatagtaatatgaaatatttattaaattttttataattaatctctgctagaaaattgattaatcatttttagtagaatttgtttttctcaact

SEQ ID NO: 4912 - DNA, 664 bp, Artificial
  Mutations within GlyA3B4 introduced by GmGlyA3B4_T03TALE nuclease
gttcatgtacggttgcagatataaacgaagcatagcttatgtatgaggtgtaacaaaattggaaacaatagccatgcaaggtgaagaatgtcaccaactcagaaacccttcttcattgacgtgtccctcactcactctcctctcttcactataaatcgccactcttcgtgttctccacttcaccaactccttcaaacttattaacactttccttagttcaatatggggaagcccttcttcactctctctctttcttccctttgcttgctactcttgtcgagtgcatgctttgctattacctccagcaagttgagtgccaactcaacaacctcaacgcgttggaacccgaccaccgcgttgagtccgaaggtggtcttattgaaacatggaactctcaacaccctgagctgcaatgcgccggtgtcactgtttccaaacgcaccctcaaccgcaacggcctccacttgccatcttactcaccttatccccaaatgatcattgtcgttcaaggtgcgtaatattagtaagaagtatttatcagcttaacgtgataacaataatagtaatatgaaatatttattaaatttttataattaatctctgctagaaaatttgattaatcattttagtagaatttgttttctcaactagttttaaaacacca

SEQ ID NO: 4913 - DNA, 649 bp, Artificial
  Mutations within GlyA3B4 introduced by GmGlyA3B4_T03TALE nuclease
gttcatgtacggttgcagatataaacgaagcatagcttatgtatgaggtgtaacaaaattggaaacaatagccatgcaaggtgaagaatgtcaccaactcagaaacccttcttcattgacgtgtccctcactcactctcctctcttcactataaatcgccactcttcgtgttctccacttcaccaactccttcaaacttattaacactttccttagttcaatatggggaagcccttcttcactctctctctttcttccctttgcttgctactcttgtcgagtgcatgctttgctattacctccagcaagagtgccaactcaacaacctcaacgcgttggaacccgaccaccgcgttgagtccgaaggtggtcttattgaaacatggaactctcaacaccctgagctgcaatgcgccggtgtcactgtttccaaacgcaccctcaaccgcaacggcctccacttgccatcttactcaccttatccccaaatgatcattgtcgttcaaggtgcgtaatattagtaagaagtatttatcagcttaacgtgataacaataatagtaatatgaaatatttattaaatttttataattaatctctgctagaaaatttgattaatcattttagtagaatttgttttctcaactagg

SEQ ID NO: 4914 - DNA, 663 bp, Artificial
  Mutations within GlyA3B4 introduced by GmGlyA3B4_T03TALE nuclease
gttcatgtacggttgcagatataaacgaagcatagcttatgtatgaggtgtaacaaaattggaaacaatagccatgcaaggtgaagaatgtcaccaactcagaaacccttcttcattgacgtgtccctcactcactctcctctcttcactataaatcgccactcttcgtgttctccacttcaccaactccttcaaacttattaacactttccttagttcaatatggggaagcccttcttcactctctctctttcttccctttgcttgctactcttgtcgagtgcatgctttgctattacctccagcaagttgtgccaactcaacaacctcaacgcgttggaacctgaccaccgcgttgagtccgaaggtggtcttattgaaacatggaactctcaacaccctgagctgcaatgcgccggtgtcactgtttccaaacgcaccctcaaccgcaacggcctccacttgccatcttactcaccttatccccaaatgatcattgtcgttcaaggtgcgtaatattagtaagaagtatttatcagcttaacgtgataacaataatagtaatatgaaatatttattaaatttttataattaatctctgctagaaaatttgattaatcattttagtagaatttgttttctcaactaggttttaaaacacca

SEQ ID NO: 4915 - DNA, 635 bp, Artificial
  Mutations within GlyA3B4 introduced by GmGlyA3B4_T03TALE nuclease
gttcatgtacggttgcagatataaacgaagcatagcttatgtatgaggtgtaacaaaattggaaacaatagccatgcaaggtgaagaatgtcaccaactcagaaacccttcttcattgacgtgtccctcactcactctcctctcttcactataaatcgccactcttcgtgttctccacttcaccaactccttcaaacttattaacactttccttagttcaatatggggaagcccttcttcactctctctctttcttccctttgcttgctactcttgtcgagtgcatgctttgctattacctccagcaagttagtgccaactcaacaacctcaacgcgttggaacccgaccaccgcgttgagtccgaaggtggtcttattgaaacatggaactctcaacaccctgagctgcaatgcgccggtgtcactgtttccaaacgcaccctcaaccgcaacggcctccacttgccatcttactcaccttatccccaaatgatcattgtcgttcaaggtgcgtaatattagtaagaagtatttatcagcttaacgtgatacaatatagtaatatgaaatatttattaaatttttataattaatctctgctagaaaatttgattaatcattttagtagaatttg

SEQ ID NO: 4916 - DNA, 499 bp, Artificial; identical to SEQ ID NO: 4828
  Mutations within GlyA3B4 introduced by GmGlyA3B4_T03TALE nuclease

SEQ ID NO: 4917 - DNA, 644 bp, Artificial
  Mutations within GlyA3B4 introduced by GmGlyA3B4_T03TALE nuclease
gttcatgtacggttgcagatataaacgaagcatagcttatgtatgaggtgtaacaaaattggaaacaatagccatgcaaggtgaagaatgtcaccaactcagaaacccttcttcattgacgtgtccctcactcactctcctctcttcactataaatcgccactcttcgtgttctccacttcaccaactccttcaaacttattaacactttccttagttcaatatggggaagcccttcttcactctctctctttcttccctttgcttgctactcttgtcgagtgcatgctttgctattacctccagcaagccaactcaacaacctcaacgcgttggaacccgaccaccgcgttgagtccgaaggtggtcttattgaaacatggaactctcaacaccctgagctgcaatgcgccggtgtcactgtttccaaacgcaccctcaaccgcaacggcctccacttgccatcttactcaccttatccccaaatgatcattgtcgttcaaggtgcgtaatattagtaagaagtatttatcagcttaacgtgataacaatatagtaatatgaaatatttattaaatttttataattaatctctgctagaaaatttgattaatcattttagtagaatttgttttctcaactagg

SEQ ID NO: 4918 - DNA, 665 bp, Artificial
  Mutations within GlyA3B4 introduced by GmGlyA3B4_T03TALE nuclease
gttcatgtacggttgcagatataaacgaagcatagcttatgtatgaggtgtaacaaaattggaaacaatagccatgcaaggtgaagaatgtcaccaactcagaaacccttcttcattgacgtgtccctcactcactctcctctcttcactataaatcgccactcttcgtgttctccacttcaccaactccttcaaacttattaacactttccttagttcaatatggggaagcccttcttcactctctctctttcttccctttgcttgctactcttgtcgagtgcatgctttgctattacctccagcaagttgagtgccaactcaacaacctcaacgcgttggaacccgaccaccgcgttgagtccgaaggtggtcttattgaaacatggaactctcaacaccctgagctgcaatgcgccggtgtcactgtttccaaacgcaccctcaaccgcaacggcctccacttgccatcttactcaccttatccccaaatgatcattgtcgttcaaggtgcgtaatattagtaagaagtatttatcagcttaacgtgataacaataatagtaatatgaaatatttattaaatttttataattaatctctgctagaaaatttgattaatcattttagtagaatttgttttctcaactaggttttaaaacacca

SEQ ID NO: 4919 - DNA, 644 bp, Artificial
  Mutations within GlyA3B4 introduced by GmGlyA3B4_T03TALE nuclease
gttcatgtacggttgcagatataaacgaagcatagcttatgtatgaggtgtaacaaaattggaaacaatagccatgcaaggtgaagaatgtcaccaactcagaaacccttcttcattgacgtgtccctcactcactctcctctcttcactataaatcgccactcttcgtgttctccacttcaccaactccttcaaacttattaacactttccttagttcaatatggggaagcccttcttcactctctctctttcttccctttgcttgctactcttgtcgagtgcatgctttgctattacctccagcaagagtgccaactcaacaacctcaacgcgttggaacccgaccaccgcgttgagtccgaaggtggtcttattgaaacatggaactctcaacaccctgagctgcaatgcgccggtgtcactgtttccaaacgcaccctcaaccgcaacggcctccacttgccatcttactcaccttatccccaaatgatcattgtcgttcaaggtgcgtaatattagtaagaagtatttatcagcttaacgtgataacaataatagtaatatgaaatatttattaaatttttataattaatctctgctagaaaatttgattaatcattttagtagaatttgttttctcaa

SEQ ID NO: 4920 - DNA, 662 bp, Artificial
  Mutations within GlyA3B4 introduced by GmGlyA3B4_T03TALE nuclease
gttcatgtacggttgcagatataaacgaagcatagcttatgtatgaggtgtaacaaaattggaaacaatagccatgcaaggtgaagaatgtcaccaactcagaaacccttcttcattgacgtgtccctcactcactctcctctcttcactataaatcgccactcttcgtgttctccacttcaccaactccttcaaacttattaacactttccttagttcaatatggggaagcccttcttcactctctctctttcttccctttgcttgctactcttgtcgagtgcatgctttgctattacctccagcaagttctgccaactcaacaacctcaacgcgttggaacccgaccaccgcgttgagtccgaaggtggtcttattgaaacatggaactctcaacaccctgagctgcaatgcgccggtgtcactgtttccaaacgcaccctcaaccgcaacggcctccacttgccatcttactcaccttatccccaaatgatcattgtcgttcaaggtgcgtaatattagtaagaagtatttatcagcttaacgtgataacaatatagtaatatgaaatatttattaaatttttataattaatctctgctagaaaatttgattaatcattttagtagaatttgttttctcaactaggttttaaaacacca

SEQ ID NO: 4921 - DNA, 619 bp, Artificial
  Mutations within GlyA3B4 introduced by GmGlyA3B4_T03TALE nuclease
gttcatgtacggttgcagatataaacgaagcatagcttatgtatgaggtgtaacaaaattggaaacaatagccatgcaaggtgaagaatgtcaccaactcagaaacccttcttcattgacgtgtccctcactcactctcctctcttcactataaatcgccactcttcgtgttctccacttcaccaactccttcaaacttattaacactttccttagttcaatatggggaagcccttcttcactctctctctttcttccctttgcttgctactcttgtcgagtgcatgctttgctattacctccagcaagttgccaactcaacaacctcaacgcgttggaacccgaccaccgcgttgagtccgaaggtggtcttattgaaacatggaactctcaacaccctgagctgcaatgcgccggtgtcactgtttccaaacgcaccctcaaccgcaacggcctccacttgccatcttactcaccttatccccaaatgatcattgtcgttcaaggtgcgtaatattagtaagaagtatttatcagcttaacgtgataacaataatagtaatatgaaatatttattaaatttttataattaatctctgctagaaaatttgattaatca

SEQ ID NO: 4922 - DNA, 663 bp, Artificial
  Mutations within GlyA3B4 introduced by GmGlyA3B4_T03TALE nuclease
gttcatgtacggttgcagatataaacgaagcatagcttatgtatgaggtgtaacaaaattggaaacaatagccatgcaaggtgaagaatgtcaccaactcagaaacccttcttcattgacgtgtccctcactcactctcctctcttcactataaatcgccactcttcgtgttctccacttcaccaactccttcaaacttattaacactttccttagttcaatatggggaagcccttcttcactctctctctttcttccctttgcttgctactcttgtcgagtgcatgctttgctattacctccagcaagttagtgccaactcaacaacctcaacgcgttggaacccgaccaccgcgttgagtccgaaggtggtcttattgaaacatggaactctcaacaccctgagctgcaatgcgccggtgtcactgtttccaaacgcaccctcaaccgcaacggcctccacttgccatcttactcaccttatccccaaatgatcattgtcgttcaaggtgcgtaatattagtaagaagtatttatcagcttaacgtgataacaatatagtaatatgaaatatttattaaatttttataattaatctctgctagaaaatttgattaatcattttagtagaatttgttttctcaactaggttttaaaacacca

SEQ ID NO: 4923 - DNA, 650 bp, Artificial
  Mutations within GlyA3B4 introduced by GmGlyA3B4_T03TALE nuclease
gttcatgtacggttgcagatataaacgaagcatagcttatgtatgaggtgtaacaaaattggaaacaatagccatgcaaggtgaagaatgtcaccaactcagaaacccttcttcattgacgtgtccctcactcactctcctctcttcactataaatcgccactcttcgtgttctccacttcaccaactccttcaaacttattaacactttccttagttcaatatggggaagcccttcttcactctctctctttcttccctttgcttgctactcttgtcgagtgcatgctttgctattacctccagcagtgccaactcaacaacctcaacgcgttggaacccgaccaccgcgttgagtccgaaggtggtcttattgaaacatggaactctcaacaccctgagctgcaatgcgccggtgtcactgtttccaaacgcaccctcaaccgcaacggcctccacttgccatcttactcaccttatccccaaatgatcattgtcgttcaaggtgcgtaatattagtaagaagtatttatcagcttaacgtgataacaataatagtaatatgaaatatttattaaatttttataattaatctctgctagaaaatttgattaatcattttagtagaatttgttttctcaactaggtttt

SEQ ID NO: 4924 - DNA, 545 bp, Artificial
  Mutations within GlyA3B4 introduced by GmGlyA3B4_T03TALE nuclease
gttcatgtacggttgcagatataaacgaagcatagcttatgtatgaggtgtaacaaaattggaaacaatagccatgcaaggtgaagaatgtcaccaactcagaaacccttcttcattgacgtgtccctcactcactctcctctcttcactataaatcgccactcttcgtgttctccacttcaccaactccttcaaacttattaacactttccttagttcaatatggggaagcccttcttcactctctctctttcttccctttgcttgctactcttgtcgagtgcatgctttgcttgaattttatttatttcccggtgtcactgtttccaaacgcaccctcaaccgcaacggcctccacttgccatcttactcaccttatcccaatgatcattgtcgttcaaggtgcgtaatattagtaagaagtatttatcagcttaacgtgataacaataatagtaatatgaaatatttattaaattttttataattaatctctgctagaaaatttgattaatcatttttagtagaatttgtttttctcaacta

SEQ ID NO: 4925 - DNA, 455 bp, Artificial
  Mutations within GlyA3B4 introduced by GmGlyA3B4_T03TALE nuclease
gttcatgtacggttgcagatataaacgaagcatagcttatgtatgaggtgtaacaaaattggaaacaatagccatgcaaggtgaagaatgtcaccaactcagaaacccttcttcattgacgtgtccctcactcactctccgcgttgagtccgaaggtggtcttattgaaacatggaactctcaacaccctgagctgcaatgcgccggtgtcactgtttccaaacgcaccctcaaccgcaacggcctccacttgccatcttactcaccttatccccaaatgatcattgtcgttcaaggtgcgtaatattagtaagaagtatttatcagcttaacgtgataacaataatagtaatatgaaatatttattaaattttttataattaatctctgctagaaaatttgattaatcatttttagtagaatttgtttttctcaactaggttttaaacaccaca

SEQ ID NO: 4926 - DNA, 495 bp, Artificial
  Mutations within GlyA3B4 introduced by GmGlyA3B4_T03TALE nuclease
gttcatgtacggttgcagatataaacgaagcatagcttatgtatgaggtgtaacaaaattggaaacaatagccatgcaaggtgaagaatgtcaccaactcagaaacccttcttcattgacgtgtccctcactcactctcctctcttcactataaatcgccactcttcgtgttctccacttcaccaactccttcaaacttattaacactttccttagttcaatatggggaagcccttcttcactctctctctttcttccctttgcttgctctcaacaccctgagctgcaatgcgccggtgtcactgtttccaaacgcaccctcaaccgcaacggcctccacttgccatcttactcaccttatccccaaatgatcattgtcgttcaaggtgcgtaatattagtaagaagtatttatcagcttaacgtgataacaataatagtaatatgaaatatttattaaattttttataattaatctctgctagaaaatttgatt

SEQ ID NO: 4927 - DNA, 468 bp, Artificial
  Mutations within GlyA3B4 introduced by GmGlyA3B4_T03TALE nuclease
gttcatgtacggttgcagatataaacgaagcatagcttatgtatgaggtgtaacaaaattggaaacaatagccatgcaaggtgaagaatgtcaccaactcagaaacccttcttcattgacgtgtccctcactcactctcctctcttcactataaatcgccactcttcgtgttctccacttcaccaactccttcaaacttattaacactttccttagttcaatatggggaagcccttcttcactctctctctttcttccctttgcttgctactcttgtcgagtgcatgctttgctattacctccagcaagtcgtgcgtaatattagtaagaagtatttatcagcttaacgtgataacaataatagtaatatgaaatatttattaaattttttataattaatctctgctagaaattgattaatcatttttagtagaatttgtttttctcaacttaggtttttaaacacca

SEQ ID NO: 4928 - DNA, 659 bp, Artificial
  Mutations within GlyA3B4 introduced by GmGlyA3B4_T03TALE nuclease
gttcatgtacggttgcagatataaacgaagcatagcttatgtatgaggtgtaacaaaattggaaacaatagccatgcaaggtgaagaatgtcaccaactcagaaacccttcttcattgacgtgtccctcactcactctcctctcttcactataaatcgccactcttcgtgttctccacttcaccaactccttcaaacttattaacactttccttagttcaatatggggaagcccttcttcactctctctctttcttccctttgcttgctactcttgtcgagtgcatgctttgctattacctccagcaagttcaacaacgagtgccaactcaacaacctcaacgcgttggaacccgaccaccgcgttgagtccgaaggtggtcttattgaaacatggaactctcaacaccctgagctgcaatgcgccggtgtcactgtttccaaacgcaccctcaaccgcaacggcctccacttgccatcttactcaccttatccccaaatgatcattgtcgttcaaggtgcgtatattagtaagaagtatttatcagcttaacgtgatacaataatagtaatatgaaatattattaaatttttataattaatctctgctagaaaatttgattaatcatttttagtagaatttgtttttcttcaactagg

SEQ ID NO: 4929 - DNA, 660 bp, Artificial; identical to SEQ ID NO: 4874
  Mutations within GlyA3B4 introduced by GmGlyA3B4_T03TALE nuclease

SEQ ID NO: 4930 - DNA, 596 bp, Artificial
  Mutations within GlyA3B4 introduced by GmGlyA3B4_T03TALE nuclease
gttcatgtacggttgcagatataaacgaagcatagcttatgtatgaggtgtaacaaaattggaaacaatagccatgcaaggtgaagaatgtcaccaactcagaaacccttcttcattgacgtgtccctcactcactctcctctcttcactataaatcgccactcttcgtgttctccacttcaccaactccttcaaacttattaacactttccttagttcaatatggggaagcccttcttcactctctctctttcttccctttgcttgctactcttttcaatatggggaacccgaccaccgcgttgagtccgaaggtggtcttattgaaacatggaactctcaacaccctgagctgcaatgcgccggtgtcactgtttccaaacgcaccctcaaccgcaacggcctccacttgccatcttactcaccttatccccaaatgatcattgtcgttcaaggtgcgtaatattagtaagaagtatttatcagcttaaacgtgataacaataatagtaatatgaaatatttattaaattttttataattaatctctgctagaaaatttgattaatcatttttagtagaatttgtttttctcaa

SEQ ID NO: 4931 - DNA, 658 bp, Artificial
  Mutations within GlyA3B4 introduced by GmGlyA3B4_T03TALE nuclease
gttcatgtacggttgcagatataaacgaagcatagcttatgtatgaggtgtaacaaaattggaaacaatagccatgcaaggtgaagaatgtcaccaactcagaaacccttcttcattgacgtgtccctcactcactctcctctcttcactataaatcgccactcttcgtgttctccacttcaccaactccttcaaacttattaacactttccttagttcaatatggggaagcccttcttcactctctctctttcttccctttgcttgctactcttgtcgagtgcatgctttgctattacctccagcatgccaactcaacaacctcaacgcgttggaacccgaccaccgcgttgagtccgaaggtggtcttattgaaacatggaactctcaacaccctgagctgcaatgcgccggtgtcactgtttccaaacgcaccctcaaccgcaacggcctccacttgccatcttactcaccttatccccaaatgatcattgtcgttcaaggtgcgtaatattagtaagaagtatttatcagcttaacgtgataacaataatagtaatatgaaatatttattaaatttttataattaatctctgctagaaaatttgattaatcattttagtagaatttgttttctcaactaggttttaaaacacca

SEQ ID NO: 4932 - DNA, 663 bp, Artificial
  Mutations within GlyA3B4 introduced by GmGlyA3B4_T03TALE nuclease
gttcatgtacggttgcagatataaacgaagcatagcttatgtatgaggtgtaacaaaattggaaacaatagccatgcaaggtgaagaatgtcaccaactcagaaacccttcttcattgacgtgtccctcactcactctcctctcttcactataaatcgccactcttcgtgttctccacttcaccaactccttcaaacttattaacactttccttagttcaatatggggaagcccttcttcactctctctctttcttccctttgcttgctactcttgtcgagtgcatgctttgctattacctccagcaagtttagtgccaactcaacaacctcaacgcgttggaacccgaccaccgcgttgagtccgaaggtggtcttattgaaacatggaactctcacaccctgagctgcaatgcgccggtgtcactgtttccaaacgcaccctcaaccgcaacggcctccacttgccatcttactcaccttatccccaaatgatcattgtcgttcaaggtgcgtaatattagtaagaagtatttatcagcttaacgtgataacaatatagtaatatgaaatatttattaaatttttataattaatctctgctagaaaatttgattaatcattttagtagaatttgttttctcaactaggttttaaaacacca

SEQ ID NO: 4933 - DNA, 665 bp, Artificial
  Mutations within GlyA3B4 introduced by GmGlyA3B4_T03TALE nuclease
  misc_feature (532): n is a or c or t or g
gttcatgtacggttgcagatataaacgaagcatagcttatgtatgaggtgtaacaaaattggaaacaatagccatgcaaggtgaagaatgtcaccaactcagaaacccttcttcattgacgtgtccctcactcactctcctctcttcactataaatcgccactcttcgtgttctccacttcaccaactccttcaaacttattaacactttccttagttcaatatggggaagcccttcttcactctctctctttcttccctttgcttgctactcttgtcgagtgcatgctttgctattacctccagcaagttcgagtgccaactcaacaacctcaacgcgttggaacccgaccaccgcgttgagtccgaaggtggtcttattgaaacatggaactctcaacaccctgagctgcaatgcgccggtgtcactgtttccaaacgcaccctcaaccgcaacggcctccacttgccatcttactcaccttatccccaaatgatcattgtcgttcaaggtgcgtaatattagtaagagnatttatcagcttaacgtgataacaatatagtaatatgaaatatttattaaatttttataattaatctctgctagaaaatttgattaatcattttagtagaatttgttttctcaactaggttttaaacaccaca

SEQ ID NO: 4934 - DNA, 377 bp, Artificial
  Mutations within GlyA3B4 introduced by GmGlyA3B4_T03TALE nuclease
gttcatgtacggttgcagatataaacgaagcatagcttatgtatgaggtgtaacaaaattggaaacaatagccatgcaaggtgaagaatgtcaccaactcagaaacccttcttcattgacgtgtccctcactcactctcctctcttcactataaatcgccactcttcgtgttctccacttcaccaactccttcaaacttattaacactttccttagttcaatatggggaagcccttcttgcactctctctctttcttccctttgcttgctactcttgtcgagtgcatgctttgctattacctccagcaagtgccaactcaacaacctcaacgcgttggaacccgaccaccgcgttgagtccgaaggtggtcttattg

SEQ ID NO: 4935 - DNA, 634 bp, Artificial
  Mutations within GlyA3B4 introduced by GmGlyA3B4_T03TALE nuclease
gttcatgtacggttgcagatataaacgaagcatagcttatgtatgaggtgtaacaaaattggaaacaatagccatgcaaggtgaagaatgtcaccaactcagaaacccttcttcattgacgtgtccctcactcactctcctctcttcactataaatcgccactcttcgtgttctccacttcaccaactccttcaaacttattaacactttccttagttcaatatggggaagcccttcttcactctctctctttcttccctttgcttgctactcttgtcgagtgcatgctttgctattacctccagcaagagtgccaactcaacaacctcaacgcgttggaacccgaccaccgcgttgagtccgaaggtggtcttattgaaacatggaactctcaacaccctgagctgcaatgcgccggtgtcactgtttccaaacgcaccctcaaccgcaacggcctccacttgccatcttactcaccttatccccaaatgatcattgtcgttcaaggtgcgtaatattagtaagaagtatttatcagcttaacgtgataacaatatagtaatatgaaatatttattaaatttttataattaatctctgctagaaaatttgattaatcattttagtagaatttg

SEQ ID NO: 4936 - DNA, 606 bp, Artificial
  Mutations within GlyA3B4 introduced by GmGlyA3B4_T03TALE nuclease
gttcatgtacggttgcagatataaacgaagcatagcttatgtatgaggtgtaacaaaattggaaacaatagccatgcaaggtgaagaatgtcaccaactcagaaacccttcttcattgacgtgtccctcactcactctcctctcttcactataaatcgccactcttcgtgttctccacttcaccaactccttcaaacttattaacactttccttagttcaatatggggaagcccttcttcactctctctctttcttccctttgcttgctatcaccaactcaacaacctcaacgcgttggaacccgaccaccgcgttgagtccgaaggtggtcttattgaaacatggaactctcaacaccctgagctgcaatgcgccggtgtcactgtttccaaacgcaccctcaaccgcaacggcctccacttgccatcttactcaccttatccccaaatgatcattgtcgttcaaggtgcgtaatattagtaagaagtatttatcagcttaacgtgataacaataatagtaatatgaaatatttattaattttttataattaatctctgctagaaatttgattaatcatttttagtagaatttgtttttctcaac

SEQ ID NO: 4937 - DNA, 660 bp, Artificial; identical to SEQ ID NO: 4874
  Mutations within GlyA3B4 introduced by GmGlyA3B4_T03TALE nuclease

SEQ ID NO: 4938 - DNA, 617 bp, Artificial; identical to SEQ ID NO: 2437
  Mutations within GlyA3B4 introduced by GmGlyA3B4_T03TALE nuclease

SEQ ID NO: 4939 - DNA, 585 bp, Artificial
  Mutations within GlyA3B4 introduced by GmGlyA3B4_T03TALE nuclease
gttcatgtacggttgcagatataaacgaagcatagcttatgtatgaggtgtaacaaaattggaaacaatagccatgcaaggtgaagaatgtcaccaactcagaaacccttcttcattgacgtgtccctcactcactctcctctcttcactataaatcgccactcttcgtgttctccacttcaccaactccttcaaacttattaacactttccttagttcaatatggggaagcccttcttcactctctctctttcttccctttgcttgctactcttgtcgagtgccaactcaacaacctcaacgcgttggaacccgaccaccgcgttgagtccgaaggtggtcttattgaaacatggaactctcaacaccctgagctgcaatgcgccggtgtcactgtttccaaacgcaccctcaaccgcaacggcctccacttgccatcttactcaccttatccccaaatgatcattgtcgttcaaggtgcgtaatattagtaagaagtatttatcagcttaacgtgataacaataatagtaatatgaaatatttattaattttttataattaatctctgctagaaaatttgatt

SEQ ID NO: 4940 - DNA, 652 bp, Artificial
  Mutations within GlyA3B4 introduced by GmGlyA3B4_T03TALE nuclease
gttcatgtacggttgcagatataaacgaagcatagcttatgtatgaggtgtaacaaaattggaaacaatagccatgcaaggtgaagaatgtcaccaactcagaaacccttcttcattgacgtgtccctcactcactctcctctcttcactataaatcgccactcttcgtgttctccacttcaccaactccttcaaacttattaacactttccttagttcaatatggggaagcccttcttcactctctctctttcttccctttgcttgctactcttgtcgagtgcatgctttgctattacctccagcaagttcgagtgccaactcaacaacctcaacgcgttggaacccgaccaccgcgttgagtccgaaggtggtcttattgaaacatggaactctcaacaccctgagctgcaatgcgccggtgtcactgtttccaaacgcaccctcaaccgcaacggcctccacttgccatcttactcaccttatccccaaatgatcattgtcgttcaaggtgcgtaatattagtaagagtatttatcagcttaacgtgataacaatatagtaatatgaaatatttattaaatttttataattaatctctgctagaaaatttgattaatcattttagtagaatttgtttttctcaactagg

SEQ ID NO: 4941 - DNA, 656 bp, Artificial
  Mutations within GlyA3B4 introduced by GmGlyA3B4_T03TALE nuclease
gttcatgtacggttgcagatataaacgaagcatagcttatgtatgaggtgtaacaaaattggaaacaatagccatgcaaggtgaagaatgtcaccaactcagaaacccttcttcattgacgtgtccctcactcactctcctctcttcactataaatcgccactcttcgtgttctccacttcaccaactccttcaaacttattaacactttccttagttcaatatggggaagcccttcttcactctctctctttcttccctttgcttgctactcttgtcgagtgcatgctttgctattacctccagcaagttcagtgccaactcaacaacctcaacgcgttggaacccgaccaccgcgttgagtccgaaggtggtcttattgaaacatggaactctcaacaccctgagctgcaatgcgccggtgtcactgtttccaaacgcaccctcaaccgcaacggcctccacttgccatcttactcaccttatccccaaatgatcattgtcgttcaaggtgcgtaatattagtaagaagtatttatcagcttaacgtgataacaataatagtaatatgaaatatttattaaatttttataattaatctctgctagaaaatttgattaatcattttagtagaatttgttttctcaactaggtttt

SEQ ID NO: 4942 - DNA, 552 bp, Artificial
  Mutations within GlyA3B4 introduced by GmGlyA3B4_T03TALE nuclease
gttcatgtacggttgcagatataaacgaagcatagcttatgtatgaggtgtaacaaaattggaaacaatagccatgcaaggtgaagaatgtcaccaactcagaaacccttcttcattgacgtgtccctcactcactctcctctcttcactataaatcgccactcttcgtgttctccacttcaccaactccttcaaacttgccaactcaacaacctcaacgcgttggaacccgaccaccgcgttgagtccgaaggtggtcttattgaaacatggaactctcaacaccctgagctgcaatgcgccggtgtcactgtttccaaacgcaccctcaaccgcaacggcctccacttgccatcttactcaccttatccccaaatgatcattgtcgttcaaggtgcgtaatattagtaagaagtatttatcagcttaacgtgataacaataatagtaatatgaaatatttattaaattttttataattaatctctgctagaaaatttgattaatcatttttagtagaatttgttttttctcaactaggttttaaacacca

SEQ ID NO: 4943 - DNA, 542 bp, Artificial
  Mutations within GlyA3B4 introduced by GmGlyA3B4_T03TALE nuclease
gttcatgtacggttgcagatataaacgaagcatagcttatgtatgaggtgtaacaaaattggaaacaatagccatgcaaggtgaagaatgtcaccaactcagaaacccttcttcattgacgtgtccctcactcactctcctctcttcactataaatcgccactcttcgtgttctccacttcaccaactccttcaaacttattaacactttccttagttcaatatggggaagcccttcttcactctctctctttcttccctttgcttgctactcttgtcgagtgcatgctttgcttgaattttatttatttcccggtgtcactgtttccaacgcaccctcaaccgcaacggcctccacttgccatcttactcaccttatccccaaatgatcattgtcgttcaaggtgcgtaatattagtaagaagtatttatcagcttaacgtgataacaataatagtaatatgaaatatttattaaattttttataattaatctctgctagaaaatttgattaatcatttttagtagaatttgttttttctc

SEQ ID NO: 4944 - DNA, 634 bp, Artificial
  Mutations within GlyA3B4 introduced by GmGlyA3B4_T03TALE nuclease
gttcatgtacggttgcagatataaacgaagcatagcttatgtatgaggtgtaacaaaattggaaacaatagccatgcaaggtgaagaatgtcaccaactcagaaacccttcttcattgacgtgtccctcactcactctcctctcttcactataaatcgccactcttcgtgttctccacttcaccaactccttcaaacttattaacactttccttagttcaatatggggaagcccttcttcactctctctctttcttccctttgcttgctactcttgtcgagtgcatgctttgctattacctccagcgtagtgccaactcaacaacctcaacgcgttggaacccgaccaccgcgttgagtccgaaggtggtcttattgaaacatggaactctcaacaccctgagctgcaatgcgccggtgtcactgtttccaaacgcaccctcaaccgcaacggcctccacttgccatcttactcaccttatccccaaatgatcattgtcgttcaaggtgcgtaatattagtaagaagtatttatcagcttaacgtgataacaataatagtaatatgaaatatttattaaatttttataattaatctctgctagaaaatttgattaatcattttagtagaatttg

SEQ ID NO: 4945 - DNA, 647 bp, Artificial
  Mutations within GlyA3B4 introduced by GmGlyA3B4_T03TALE nuclease
gttcatgtacggttgcagatataaacgaagcatagcttatgtatgaggtgtaacaaaattggaaacaatagccatgcaaggtgaagaatgtcaccaactcagaaacccttcttcattgacgtgtccctcactcactctcctctcttcactataaatcgccactcttcgtgttctccacttcaccaactccttcaaacttattaacactttccttagttcaatatggggaagcccttcttcactctctctctttcttccctttgcttgctactcttgtcgagtgcatgctttgctattacctccagcaaaacaacctcaacgcgttggaacccgaccaccgcgttgagtccgaaggtggtcttattgaaacatggaactctcaacaccctgagctgcaatgcgccggtgtcactgtttccaaacgcaccctcaaccgcaacggcctccacttgccatcttactcaccttatccccaaatgatcattgtcgttcaaggtgcgtaaatattagtaagaagtatttatcagctttaacgtgataacaataatagtaatatgaaatatttattaaattttttataattaatctctgctagaaaatttgattaatcatttttagtagaatttgttttttctcaactaggtttt

SEQ ID NO: 4946 - DNA, 660 bp, Artificial
  Mutations within GlyA3B4 introduced by GmGlyA3B4_T03TALE nuclease
gttcatgtacggttgcagatataaacgaagcatagcttatgtatgaggtgtaacaaaattggaaacaatagccatgcaaggtgaagaatgtcaccaactcagaaacccttcttcattgacgtgtccctcactcactctcctctcttcactataaatcgccactcttcgtgttctccacttcaccaactccttcaaacttattaacactttccttagttcaatatggggaagcccttcttcactctctctctttcttccctttgcttgctactcttgtcgagtgcatgctttgctattacctccagcaagtgccaactcaacaacctcaacgcgttggaacccgaccaccgcattgagtccgaaggtggtcttattgaaacatggaactctcaacaccctgagctgcaatgcgccggtgtcactgtttccaaacgcaccctcaaccgcaacggcctccacttgccatcttactcaccttatccccaaatgatcattgtcgttcaaggtgcataatattagtaagaagtatttatcagcttaacgtgataacaataatagtaatatgaaatatttattaaatttttataattaatctctgctagaaaatttgattaatcattttagtagaatttgttttctcaactaggttttaaaacacca

SEQ ID NO: 4947 - DNA, 636 bp, Artificial
  Mutations within GlyA3B4 introduced by GmGlyA3B4_T03TALE nuclease
gttcatgtacggttgcagatataaacgaagcatagcttatgtatgaggtgtaacaaaattggaaacaatagccatgcaaggtgaagaatgtcaccaactcagaaacccttcttcattgacgtgtccctcactcactctcctctcttcactataaatcgccactcttcgtgttctccacttcaccaactccttcaaacttattaacactttccttagttcaatatggggaagcccttcttcactctctctctttcttccctttgcttgctactcttgtcgagtgcatgctttgctattacctccagcaagttctgccaactcaacaacctcaacgcgttggaacccgaccaccgcgttgagtccgaaggtggtcttattgaaacatggaactctcaacaccctgagctgcaatgcgccggtgtcactgtttccaaacgcaccctcaaccgcaacggcctccacttgccatcttactcaccttatccccaaatgatcattgtcgttcaaggtgcgtaatattagtaagaagtatttatcagcttaacgtgataacaataatagtaatatgaaatatttattaaatttttataattaatctctgctagaaaatttgattaatcattttagtagaatttg

SEQ ID NO: 4948 - DNA, 614 bp, Artificial
  Mutations within GlyA3B4 introduced by GmGlyA3B4_T03TALE nuclease
gttcatgtacggttgcagatataaacgaagcatagcttatgtatgaggtgtaacaaaattggaaacaatagccatgcaaggtgaagaatgtcaccaactcagaaacccttcttcattgacgtgtccctcactcactctcctctcttcactataaatcgccactcttcgtgttctccacttcaccaactccttcaaacttattaacactttccttagttcaatatggggaagcccttcttcactctctctctttcttccctttgcttgctactcttgtcgagtgcatgctttgctattacctccagcaagttgagtccgaaggtggtcttattgaaacatggaactctcaacaccctgagctgcaatgcgccggtgtcactgtttccaaacgcaccctcaaccgcaacggcctccacttgccatcttactcaccttatccccaaatgatcattgtcgttcaaggtgcgtaatattagtaagaagtatttatcagcttaacgtgataacaataatagtaatatgaaatatttattaatttttataattaatctctgctagaaaatttgattaatcatttttagtagaatttgtttttctcaactaggtttttaaaa

SEQ ID NO: 4949 - DNA, 619 bp, Artificial
  Mutations within GlyA3B4 introduced by GmGlyA3B4_T03TALE nuclease
gttcatgtacggttgcagatataaacgaagcatagcttatgtatgaggtgtaacaaaattggaaacaatagccatgcaaggtgaagaatgtcaccaactcagaaacccttcttcattgacgtgtccctcactcactctcctctcttcactataaatcgccactcttcgtgttctccacttcaccaactccttcaaacttattaacactttccttagttcaatatggggaagcccttcttcactctctctctttcttccctttgcttgctactcttgtcgagtgccaactcaacaacctcaacgcgttggaacccgaccaccgcgttgagtcccgaaggtggtcttattgaaacatggaactctcaacaccctgagctgcaatgcgccggtgtcactgtttccaaaacgcaccctcaaccgcaacggcctccacttgccatcttactcaccttatcccccaaatgatcattgtcgttcaaggtgcgtaatattagtaagaagtatttatcagcttaacgtgataacaataatagtaatatgaaatatttattaattttttataattaatctctgctagaaaatttgattaatcatttttagtagaatttgtttttctcaa

SEQ ID NO: 4950 - DNA, 615 bp, Artificial
  Mutations within GlyA3B4 introduced by GmGlyA3B4_T03TALE nuclease
gttcatgtacggttgcagatataaacgaagcatagcttatgtatgaggtgtaacaaaattggaaacaatagccatgcaaggtgaagaatgtcaccaactcagaaacccttcttcattgacgtgtccctcactcactctcctctcttcactataaatcgccactcttcgtgttctccacttcaccaactccttcaaacttattaacactttccttagttcaatatggggaagcccttcttcactctctctctttcttccctttgcttgctactcttgtcgagtgcatgctttgctattacctccaagtgccaactcaacaacctcaacgcgttggaacccgaccaccgcgttgagtccgaaggtggtcttattgaaacatggaactctcaacaccctgagctgcaatgcgccggtgtcactgtttccaaacgcaccctcaaccgcaacggcctccacttgccatcttactcaccttatccccaaatgatcattgtcgttcaaggtgcgtaatattagtaagaagtatttatcagcttaacgtgataacaataatagtaatatgaaatatttattaaatttttataattaatctctgctagaaaatttgattaatca

SEQ ID NO: 4951 - DNA, 643 bp, Artificial
  Mutations within GlyA3B4 introduced by GmGlyA3B4_T03TALE nuclease
gttcatgtacggttgcagatataaacgaagcatagcttatgtatgaggtgtaacaaaattggaaacaatagccatgcaaggtgaagaatgtcaccaactcagaaacccttcttcattgacgtgtccctcactcactctcctctcttcactataaatcgccactcttcgtgttctccacttcaccaactccttcaaacttattaacactttccttagttcaatatggggaagcccttcttcactctctctctttcttccctttgcttgctactcttgtcgagtgcatgctttgctattacctccagcaagttcaacaactcaacaacctcaacgcgttggaacccgaccaccgcgttgagtccgaaggtggtcttattgaaacatggaactctcaacaccctgagctgcaatgcgccggtgtcactgtttccaaacgcaccctcaaccgcaacggcctccacttgccatcttactcaccttatccccaaatgatcattgtcgttcaaggtgcgtaatattagtaagaagtatttatcagcttaacgtgataacaatatagtaatatgaaatatttattaaatttttataattaatctctgctagaaaatttgattaatcattttagtagaatttgttttctcaa

SEQ ID NO: 4952 - DNA, 630 bp, Artificial
  Mutations within GlyA3B4 introduced by GmGlyA3B4_T03TALE nuclease
gttcatgtacggttgcagatataaacgaagcatagcttatgtatgaggtgtaacaaaattggaaacaatagccatgcaaggtgaagaatgtcaccaactcagaaacccttcttcattgacgtgtccctcactcactctcctctcttcactataaatcgccactcttcgtgttctccacttcaccaactccttcaaacttattaacactttccttagttcaatatggggaagcccttcttcactctctctctttcttccctttgcttgctactcttgtcgagtgcatgctttgctattacctccagctgccaactcaacaacctcaacgcgttggaacccgaccaccgcgttgagtccgaaggtggtcttattgaaacatggaactctcaacaccctgagctgcaatgcgccggtgtcactgtttccaaacgcaccctcaaccgcaacggcctccacttgccatcttactcaccttatccccaaatgatcattgtcgttcaaggtgcgtaatattagtaagaagtatttatcagcttaacgtgataacaataatagtaatatgaaatatttattaaatttttataattaatctctgctagaaaatttgattaatcattttagtagaatttg

SEQ ID NO: 4953 - DNA, 660 bp, Artificial; identical to SEQ ID NO: 4874
  Mutations within GlyA3B4 introduced by GmGlyA3B4_T03TALE nuclease

SEQ ID NO: 4954 - DNA, 643 bp, Artificial
  Mutations within GlyA3B4 introduced by GmGlyA3B4_T03TALE nuclease
gttcatgtacggttgcagatataaacgaagcatagcttatgtatgaggtgtaacaaaattggaaacaatagccatgcaaggtgaagaatgtcaccaactcagaaacccttcttcattgacgtgtccctcactcactctcctctcttcactataaatcgccactcttcgtgttctccacttcaccaactccttcaaacttattaacactttccttagttcaatatggggaagcccttcttcactctctctctttcttccctttgcttgctactcttgtcgagtgcatgctttgctattacctccagcaagtgtgccaactcaacaacctcaacgcgttggaacccgaccaccgcgttgagtccgaaggtggtcttattgaaacatggaactctcaacaccctgagctgcaatgcgccggtgtcactgtttccaaacgcaccctcaaccgcaacggcctccacttgccatcttactcaccttatccccaaatgatcattgtcgttcaaggtgcgtaatattagtaagaagtatttatcagcttaacgtgataacaatatagtaatatgaaatatttattaaatttttataattaatctctgctagaaaatttgattaatcattttagtagaatttgttttctcaa

SEQ ID NO: 4955 - DNA, 619 bp, Artificial
  Mutations within GlyA3B4 introduced by GmGlyA3B4_T03TALE nuclease
gttcatgtacggttgcagatataaacgaagcatagcttatgtatgaggtgtaacaaaattggaaacaatagccatgcaaggtgaagaatgtcaccaactcagaaacccttcttcattgacgtgtccctcactcactctcctctcttcactataaatcgccactcttcgtgttctccacttcaccaactccttcaaacttattaacactttccttagttcaatatggggaagcccttcttcactctctctctttcttccctttgcttgctactcttgtcgagtgcatgctttgctattacctccagcaagtgtgccaactcaacaacctcaacgcgttggaacccgaccaccgcgttgagtccgaaggtggtcttattgaaacatggaactctcaacaccctgagctgcaatgcgccggtgtcactgtttccaaacgcaccctcaaccgcaacggcctccacttgccatcttactcaccttatccccaaatgatcattgtcgttcaaggtgcgtaatattagtaagaagtatttatcagcttaacgtgataacaatatagtaatatgaaatatttattaaatttttataattaatctctgctagaaaatttgattaatca

SEQ ID NO: 4956 - DNA, 503 bp, Artificial; identical to SEQ ID NO: 4875
  Mutations within GlyA3B4 introduced by GmGlyA3B4_T03TALE nuclease

SEQ ID NO: 4957 - DNA, 668 bp, Artificial
  Mutations within GlyA3B4 introduced by GmGlyA3B4_T03TALE nuclease
  misc_feature (533): n is a or c or t or g
gttcatgtacggttgcagatataaacgaagcatagcttatgtatgaggtgtaacaaaattggaaacaatagccatgcaaggtgaagaatgtcaccaactcagaaacccttcttcattgacgtgtccctcactcactctcctctcttcactataaatcgccactcttcgtgttctccacttcaccaactccttcaaacttattaacactttccttagttcaatatggggaagcccttcttcactctctctctttcttccctttgcttgctactcttgtcgagtgcatgctttgctattacctccagcaagttcgagtgccaactcaacaacctcaacgcgttggaacccgaccaccgcgttgagtccgaaggtggtcttattgaaacatggaactctcaacaccctgagctgcaatgcgccggtgtcactgtttccaaacgcaccctcaaccgcaacggcctccacttgccatcttactcaccttatccccaaatgatcattgtcgttcaaggtgcgtaatattagtaagaagnatttatcagcttaacgtgataacaataatagtaatatgaaatatttattaaatttttataattaatctctgctagaaaatttgattaatcattttagtagaatttgtttttctcaactaggtttttaaaacacca

SEQ ID NO: 4958 - DNA, 425 bp, Artificial
  Mutations within GlyA3B4 introduced by GmGlyA3B4_T03TALE nuclease
gttcatgtacggttgcagatataaacgaagcatagcttatgtatgaggtgtaacaaaattggaaacaatagccatgcaactcaacaacctcaacgcgttggaacccgaccaccgcgttgagtccgaaggtggtcttattgaaacatggaactctcaacaccctgagctgcaatgcgccggtgtcactgtttccaaacgcaccctcaaccgcaacggcctccacttgccatcttactcaccttatccccaaatgatcattgtcgttcaaggtgcgtaatattagtaagaagtatttatcagcttaacgtgataacaataatagtaatatgaaatatttattaaattttttataattaatctctgctagaaaaatttgattaatcatttttagtagaatttgttttttctcaactaggttttaaaca

SEQ ID NO: 4959 - DNA, 621 bp, Artificial
  Mutations within GlyA3B4 introduced by GmGlyA3B4_T03TALE nuclease
gttcatgtacggttgcagatataaacgaagcatagcttatgtatgaggtgtaacaaaattggaaacaatagccatgcaaggtgaagaatgtcaccaactcagaaacccttcttcattgacgtgtccctcactcactctcctctcttcactataaatcgccactcttcgtgttctccacttcaccaactccttcaaacttattaacactttccttagttcaatatggggaagcccttcttcactctctctctttcttccctttgcttgctactcttgtcgagtgcatgctttgctattacctccagcaagttcatgccaactcaacaacctcaacgcgttggaacccgaccaccgcgttgagtccgaaggtggtcttattgaaacatggaactctcaacaccctgagctgcaatgcgccggtgtcactgtttccaaacgcaccctcaaccgcaacggcctccacttgccatcttactcaccttatccccaaatgatcattgtcgttcaaggtgcgtaatattagtaagaagtatttatcagcttaacgtgataacaatatagtaatatgaaatatttattaaatttttataattaatctctgctagaaaatttgattaatca

SEQ ID NO: 4960 - DNA, 445 bp, Artificial; identical to SEQ ID NO: 4799
  Mutations within GlyA3B4 introduced by GmGlyA3B4_T03TALE nuclease

SEQ ID NO: 4961 - DNA, 599 bp, Artificial; identical to SEQ ID NO: 2087
  Mutations within GlyA3B4 introduced by GmGlyA3B4_T03TALE nuclease

SEQ ID NO: 4962 - DNA, 643 bp, Artificial; identical to SEQ ID NO: 4829
  Mutations within GlyA3B4 introduced by GmGlyA3B4_T03TALE nuclease

SEQ ID NO: 4963 - DNA, 426 bp, Artificial; identical to SEQ ID NO: 4777
  Mutations within GlyA3B4 introduced by GmGlyA3B4_T03TALE nuclease

SEQ ID NO: 4964 - DNA, 665 bp, Artificial
  Mutations within GlyA3B4 introduced by GmGlyA3B4_T03TALE nuclease
gttcatgtacggttgcagatataaacgaagcatagcttatgtatgaggtgtaacaaaattggaaacaatagccatgcaaggtgaagaatgtcaccaactcagaaacccttcttcattgacgtgtccctcactcactctcctctcttcactataaatcgccactcttcgtgttctccacttcaccaactccttcaaacttattaacactttccttagttcaatatggggaagcccttcttcactctctctctttcttccctttgcttgctactcttgtcgagtgcatgctttgctattacctccagcaagttcaagtgccaactcaacaacctcaacgcgttggaacccgaccaccgcgttgagtccgaaggtggtcttattgaaacatggaactctcaacacctgagctgcaatgcgccggtgtcactgtttccaaacgcaccctcaaccgcaacggcctccacttgccatcttactcaccttatccccaaatgatcattgtcgttcaaggtgcgtaatattagtaagaagtatttatcagcttaacgtgataacaataatagtaatatgaaatatttattaaatttttataattaatctctgctagaaaatttgattaatcattttagtagaatttgttttctcaactaggttttaaaacacca

SEQ ID NO: 4965 - DNA, 413 bp, Artificial
  Mutations within GlyA3B4 introduced by GmGlyA3B4_T03TALE nuclease
gttcatgtacggttgcagatataaacgaagcatagcttatgtatgaggtgtaacaaaattggaaacaatagccatgcaaggtgaagaatgtcaccaactcagaaacccttcttcattgacgtgtccctcactcactctcctctcttcactataaatcgccactcttcgtgttctccacttcaccaactccttcaaacttattaacactttccttagttcaatatggggaagcccttcttcactctctctctttcttccctttgcttgctactcttgtcgagtgccaactcaacaacctcaacgcgttggaacccgaccaccgcgttgagtccgaaggtggtcttattgaaacatggaactctcaacaccctgagctgcaatgcgccggtgtcactgtttccaaacgcaccctc

SEQ ID NO: 4966 - DNA, 664 bp, Artificial
  Mutations within GlyA3B4 introduced by GmGlyA3B4_T03TALE nuclease
gttcatgtacggttgcagatataaacgaagcatagcttatgtatgaggtgtaacaaaattggaaacaatagccatgcaaggtgaagaatgtcaccaactcagaaacccttcttcattgacgtgtccctcactcactctcctctcttcactataaatcgccactcttcgtgttctccacttcaccaactccttcaaacttattaacactttccttagttcaatatggggaagcccttcttcactctctctctttcttccctttgcttgctactcttgtcgagtgcatgctttgctattacctccagcaagttcagtgccaactcaacaacctcaacgcgttggaacccgaccaccgcgttgagtccgaaggtggtcttattgaaacatggaactctcaacaccctgagctgcaatgcgccggtgtcactgtttccaaacgcaccctcaaccgcaacggcctccacttgccatcttactcaccttatccccaaatgatcattgtcgttcaaggtgcgtaatattagtaagaagtatttatcagcttaacgtgataacaatatagtaatatgaaatatttattaaatttttataattaatctctgctagaaaatttgattaatcattttagtagaatttgtttttctcaactaggttttaaacacca

SEQ ID NO: 4967 - DNA, 663 bp, Artificial
  Mutations within GlyA3B4 introduced by GmGlyA3B4_T03TALE nuclease
gttcatgtacggttgcagatataaacgaagcatagcttatgtatgaggtgtaacaaaattggaaacaatagccatgcaaggtgaagaatgtcaccaactcagaaacccttcttcattgacgtgtccctcactcactctcctctcttcactataaatcgccactcttcgtgttctccacttcaccaactccttcaaacttattaacactttccttagttcaatatggggaagcccttcttcactctctctctttcttccctttgcttgctactcttgtcgagtgcatgctttgctattacctccagcaagtagtgccaactcaacaacctcaacgcgttggaacccgaccaccgcgttgagtccgaaggtggtcttattgaaacatggaactctcaacaccctgagctgcaatgcgccggtgtcactgtttccaaacgcaccctcaaccgcaacggcctccacttgccatcttactcaccttatccccaaatgatcattgtcgttcaaggtgcgtaatattagtaagaagtatttatcagcttaacgtgataacaataatagtaatatgaaatatttattaaatttttataattaatctctgctagaaaatttgattaatcattttagtagaatttgttttctcaactaggttttaaaacacca

SEQ ID NO: 4968 - DNA, 606 bp, Artificial
  Mutations within GlyA3B4 introduced by GmGlyA3B4_T03TALE nuclease
gttcatgtacggttgcagatataaacgaagcatagcttatgtatgaggtgtaacaaaattggaaacaatagccatgcaaggtgaagaatgtcaccaactcagaaacccttcttcattgacgtgtccctcactcactctcctctcttcactataaatcgccactcttcgtgttctccacttcaccaactccttcaaacttattaacactttccttagttcaatatggggaagcccttcttcactctctctctttcttccctttgcttgctatcaccaactcaacaacctcaacgcgttggaacccgaccaccgcgttgagtccgaaggtggtcttattgaaacatggaactctcaacaccctgagctgcaatgcgccggtgtcactgtttccaaacgcaccctcaaccgcaacggcctccacttgccatcttactcaccttatccccaaatgatcattgtcgttcaaggtgcgtaatattagtaagaagtatttatcagcttaacgtgataacaataatagtaatatgaaatatttattaatttttataattaatctctgctagaaaatttgattaatcatttttagtagaatttgtttttctcaac

SEQ ID NO: 4969 - DNA, 654 bp, Artificial
  Mutations within GlyA3B4 introduced by GmGlyA3B4_T03TALE nuclease
gttcatgtacggttgcagatataaacgaagcatagcttatgtatgaggtgtaacaaaattggaaacaatagccatgcaaggtgaagaatgtcaccaactcagaaacccttcttcattgacgtgtccctcactcactctcctctcttcactataaatcgccactcttcgtgttctccacttcaccaactccttcaaacttattaacactttccttagttcaatatggggaagcccttcttcactctctctctttcttccctttgcttgctactcttgtcgagtgcatgctttgctattacctccagcaagttcaatcaacgcgttggaacccgaccaccgcgttgagtccgaaggtggtcttattgaaacatggaactctcaacaccctgagctgcaatgcgccggtgtcactgtttccaaacgcaccctcaaccgcaacggcctccacttgccatcttactcaccttatccccaaatgatcattgtcgttcaaggtgcgtaatattagtaagaagtatttatcagcttaacgtgataacaataatagtaatatgaaatatttattaaattttttataattaatctctgctagaaaatttgattaatcatttttagtagaatttgttttttctcaactaggttttaaacaccaca

SEQ ID NO: 4970 - DNA, 525 bp, Artificial
  Mutations within GlyA3B4 introduced by GmGlyA3B4_T03TALE nuclease
gttcatgtacggttgcagatataaacgaagcatagcttatgtatgaggtgtaacaaaattggaaacaatagccatgcgaggtgaagaatgtcaccaactcagaaacccttcttcattgacgtgtccctcactcactctcctctcttcactataaatcgccactcttcgtgttctccacttcaccaactccttcaaacttattaacactttccttagttcaatatggggaagcccttcttattgaaacatggaactctcaacaccctgagctgcaatgcgccggtgtcactgtttccaaacgcaccctcaaccgcaacggcctccacttgccatcttactcaccttatccccaaatgatcattgtcgttcaaggtgcgtaatattagtaagaagtattttatcagcttaacgtgataacaataatagtaatatgaaatatttattaaattttttataattaatctctgctagaaaatttgattaatcatttttagtagaatttgtttttctcaactaggtttaaac

SEQ ID NO: 4971 - DNA, 608 bp, Artificial
  Mutations within GlyA3B4 introduced by GmGlyA3B4_T03TALE nuclease
gttcatgtacggttgcagatataaacgaagcatagcttatgtatgaggtgtaacaaaattggaaacaatagccatgcaaggtgaagaatgtcaccaactcagaaacccttcttcattgacgtgtccctcactcactctcctctcttcactataaatcgccactcttcgtgttctccacttcaccaactccttcaaacttattaacactttccttagttcaatatggggaagcccttcttcactctctctctttcttccctttgcttgctactcttgtcgagtgcatgctttgctattacctccactcaacaacctcaacgcgttggaacccgaccaccgcgttgagtccgaaggtggtcttattgaaacatggaactctcaacaccctgagctgcaatgcgccggtgtcactgtttccaaacgcaccctcaaccgcaacggcctccacttgccatcttactcaccttatcccccaaatgatcattgtcgtcaaggtgcgtaaatattagtaagaagtatttatcagcttaacgtgataacaataatagtaatatgaaatatttattaaattttttataattaatctctgctagaaaatttgattaatc

SEQ ID NO: 4972 - DNA, 569 bp, Artificial
  Mutations within GlyA3B4 introduced by GmGlyA3B4_T03TALE nuclease
gttcatgtacggttgcagatataaacgaagcatagcttatgtatgaggtgtaacaaaattggaaacaatagccatgcaaggtgaagaatgtcaccaactcagaaacccttcttcattgacgtgtccctcactcactctcctctcttcactataaatcgccactcttcgtgttctccacttcaccaactccttcaaacttattaacactttccttagttcaatatggggaagcccttcttcactctctctctttcttccctttgcttgctactcttgagtccgaaggtggtcttattgaaacatggaactctcaacaccctgagctgcaatgcgccggtgtcactgtttccaaacgcaccctcaaccgcaacggcctccacttgccatcttactcaccttatccccaaatgatcattgtcgttcaaggtgcgtaatattagtaagaagtatttatcagcttaacgtgataacaataatagtaatatgaaatatttattaaattttttatattaatctctgctagaaaatttgattaatcattttagtagaatttgtttttctcaactagg

SEQ ID NO: 4973 - DNA, 665 bp, Artificial; identical to SEQ ID NO: 4918
  Mutations within GlyA3B4 introduced by GmGlyA3B4_T03TALE nuclease

SEQ ID NO: 4974 - DNA, 648 bp, Artificial
  Mutations within GlyA3B4 introduced by GmGlyA3B4_T03TALE nuclease
gttcatgtacggttgcagatataaacgaagcatagcttatgtatgaggtgtaacaaaattggaaacaatagccatgcaaggtgaagaatgtcaccaactcagaaacccttcttcattgacgtgtccctcactcactctcctctcttcactataaatcgccactcttcgtgttctccacttcaccaactccttcaaacttattaacactttccttagttcaatatggggaagcccttcttcactctctctctttcttccctttgcttgctactcttgtcgagtgcatgctttgctattacctccagcaagttcaagtgccaactcaacaacctcaacgcgttggaacccgaccaccgcgttgagtccgaaggtggtcttattgaaacatggaactctcaacaccctgagctgcaatgcgccggtgtcactgtttccaaacgcaccctcaaccgcaacggcctccacttgccatcttactcaccttatccccaaatgatcattgtcgttcaaggtgcgtaatattagtaagaagtatttatcagcttaacgtgataacaataatagtaatatgaaatatttattaaatttttataattaatctctgctagaaaatttgattaatcattttagtagaatttgttttctcaa

SEQ ID NO: 4975 - DNA, 663 bp, Artificial
  Mutations within GlyA3B4 introduced by GmGlyA3B4_T03TALE nuclease
gttcatgtacggttgcagatataaacgaagcatagcttatgtatgaggtgtaacaaaattggaaacaatagccatgcaaggtgaagaatgtcaccaactcagaaacccttcttcattgacgtgtccctcactcactctcctctcttcactataaatcgccactcttcgtgttctccacttcaccaactccttcaaacttattaacactttccttagttcaatatggggaagcccttcttcactctctctctttcttccctttgcttgctactcttgtcgagtgcatgctttgctattacctccagcaagttgtgccaactcaacaacctcaacgcgttggaacccgaccaccgcgttgagtccgaaggtggtcttattgaaacatggaactctcaacaccctgagctgcaatgcgccggtgtcactgtttccaaacgcaccctcaaccgcaacggcctccacttgccatcttactcaccttatccccaaatgatcattgtcgttcaaggtgcgtaatattagtaagaagtatttatcagcttaacgtgataacaataatagtaatatgaaatatttattaaatttttataattaatctctgctagaaaatttgattaatcattttagtagaatttgttttctcaactaggttttaaaacacca

SEQ ID NO: 4976 - DNA, 617 bp, Artificial; identical to SEQ ID NO: 2759
  Mutations within GlyA3B4 introduced by GmGlyA3B4_T03TALE nuclease

SEQ ID NO: 4977 - DNA, 661 bp, Artificial
  Mutations within GlyA3B4 introduced by GmGlyA3B4_T03TALE nuclease
gttcatgtacggttgcagatataaacgaagcatagcttatgtatgaggtgtaacaaaattggaaacaatagccatgcaaggtgaagaatgtcaccaactcagaaacccttcttcattgacgtgtccctcactcactctcctctcttcactataaatcgccactcttcgtgttctccacttcaccaactccttcaaacttattaacactttccttagttcaatatggggaagcccttcttcactctctctctttcttccctttgcttgctactcttgtcgagtgcatgctttgctattacctccagcaagttagtgccaactcaacaacctcaacgcgttggaacccgaccaccgcgttgagtccgaaggtggtcttattgaaacatggaactctcaacaccctgagctgcaatgcgccggtgtcactgtttccaacgcaccctcaaccgcaacggcctccacttgccatcttactcaccttatccccaaatgatcattgtcgttcaaggtgcgtaatattagtaagaagtatttatcagcttaacgtgatacaatatagtaatatgaaatatttattaaatttttataattaatctctgctagaaaatttgattaatcattttagtagaatttgttttctcaactaggttttaaaacacca

SEQ ID NO: 4978 - DNA, 603 bp, Artificial
  Mutations within GlyA3B4 introduced by GmGlyA3B4_T03TALE nuclease
gttcatgtacggttgcagatataaacgaagcatagcttatgtatgaggtgtaataaaattggaaacaatagccatgcaaggtgaagaatgtcaccaactcagaaacccttcttcattgacgtgtccctcactcactctcctctcttcactataaatcgccactcttcgtgttctccacttcaccaactccttcaaacttattaacactttccttagttcaatatggggaagcccttcttcactctctctctttcttccctttgcttgctactcttgtcgagtgcatgctttgctattaaaacatggaactcactgagtccgaaggtggtcttattgaaacatggaactctcaacaccctgagctgcaatgcgccggtgtcactgtttccaaacgcaccctcaaccgcaacggcctccacttgccatcttactcaccttatccccaaatgatcattgtcgttcaaggtgcgtaatattagtaagaagtatttatcagcttaacgtgataacaataatagtaatatgaaatatttattaatttttataattaatctctgctagaaatttgattaatcatttttagtagaatttgtttttctcaac

SEQ ID NO: 4979 - DNA, 663 bp, Artificial; identical to SEQ ID NO: 4967
  Mutations within GlyA3B4 introduced by GmGlyA3B4_T03TALE nuclease

SEQ ID NO: 4980 - DNA, 660 bp, Artificial
  Mutations within GlyA3B4 introduced by GmGlyA3B4_T03TALE nuclease
gttcatgtacggttgcagatataaacgaagcatagcttatgtatgaggtgtaacaaaattggaaacaatagccatgcaaggtgaagaatgtcaccaactcagaaacccttcttcattgacgtgtccctcactcactctcctctcttcactataaatcgccactcttcgtgttctccacttcaccaactccttcaaacttattaacactttccttagttcaatatggggaagcccttcttcactctctctctttcttccctttgcttgctactcttgtcgagtgcatgctttgctattacctccagcaatgccaactcaacaacctcaacgcgttggaacccgaccaccgcgttgagtccgaaggtggtcttattgaaacatggaactctcaacaccctgagctgcaatgcgccggtgtcactgtttccaaacgcaccctcaaccgcaacggcctccacttgccatcttactcaccttatccccaaatgatcattgtcgttcaaggtgcgtaatattagtaagaagtatttatcagcttaacgtgataacaataatagtaatatgaaatatttattaaatttttataattaatctctgctagaaaatttgattaatcattttagtagaatttgttttctcaactaggtttttaaaacacca

SEQ ID NO: 4981 - DNA, 612 bp, Artificial
  Mutations within GlyA3B4 introduced by GmGlyA3B4_T03TALE nuclease
gttcatgtacggttgcagatataaacgaagcatagcttatgtatgaggtgtaacaaaattggaaacaatagccatgcaaggtgaagaatgtcaccaactcagaaacccttcttcattgacgtgtccctcactcactctcctctcttcactataaatcgccactcttcgtgttctccacttcaccaactccttcaaacttattaacactttccttagttcaatatggggaagcccttcttcactctctctctttcttccctttgcttgcaactcaacaacctcaacgcgttggaacccgaccaccgcgttgagtccgaaggtggtcttattgaaacatggaactctcaacaccctgagctgcaatgcgccggtgtcactgtttccaaacgcaccctcaaccgcaacggcctccacttgccatcttactcaccttatccccaaatgatcattgtcgttcaaggtgcgtaatattagtaagaagtatttatcagcttaacgtgataacaataatagtaatatgaaatatttattaatttttataattaatctctgctagaaaatttgattaatcatttttagtagaatttgtttttctcaactaggtttttaaaa

SEQ ID NO: 4982 - DNA, 483 bp, Artificial
  Mutations within GlyA3B4 introduced by GmGlyA3B4_T03TALE nuclease
gttcatgtacggttgcagatataaacgaagcatagcttatgtatgaggtgtaacaaaattggaaacaatagccatgcaaggtgaagaatgtcaccaactcagaaacccttcttcattgacgtgtccctcactcactctcctctcttcactataaatcgccactcttcgtgttctccacttcaccaactccttcaaacttattaacactttccttagttcaatatggggaagcccttcttcactctctctctttcttcccgaccaccgcgttgagtccgaaggtggtcttattgaaacatggaactctcaacaccctgagctgcaatgcgccggtgtcactgtttccaaacgcaccctcaaccgcaacggcctccacttgccatcttactcaccttatccccaaaatgatcattgtcgttcaaggtgcgtaatattagtaagaagtatttatcagcttaacgtgataacaataatagtaatatg

SEQ ID NO: 4983 - DNA, 430 bp, Artificial
  Mutations within GlyA3B4 introduced by GmGlyA3B4_T03TALE nuclease
gttcatgtacggttgcagatataaacgaagcatagcttatgtatgaggtgtaacaaaattggaaacaatagccatgcaaggtgaagaatgtcaccaactcagaaacccttcttcattgacgtgtccctcactcactctcctctcttcactataaatcgccactcttcgtgttctccacttcaccaactccttcaaacttattaacactttccttagttcaatatggggaagcccttcttcactctctctctttcttccctttgcttgctactcttgtcgagtgcatgctttgctattacctccagcaagtcgtgcgtaatattagtaagaagtatttatcagcttaacgtgataacaataatagtaatatgaaatatttattaaattttttataattaatctctgctagaaaatttgattaatcattttt

SEQ ID NO: 4984 - DNA, 414 bp, Artificial
  Mutations within GlyA3B4 introduced by GmGlyA3B4_T03TALE nuclease
gttcatgtacggttgcagatataaacgaagcatagcttatgtatgaggtgtaacaaaattggaaacaatagccatgcaaggtgaagaatgtcaccaactcagaaacccttcttcattgacgtgtccctcactcactctcctctcttcactataaatcgccactcttcgtgttctccacttcaccaactccttcaaacttattaacactttccttagttcaatatggggaagcccttcttcactctctctctttcttccctttgcttgctactcttgtcgagtgcatgctttgctattacctccagcaagtttgccaactgacgtacagccctaccaatccgacgattggacccctcagcagccagccttggcaagttgcccaggatccccgaaaccgggtcgggtttgcattga

SEQ ID NO: 4985 - DNA, 661 bp, Artificial
  Mutations within GlyA3B4 introduced by GmGlyA3B4_T03TALE nuclease
gttcatgtacggttgcagatataaacgaagcatagcttatgtatgaggtgtaacaaaattggaaacaatagccatgcaaggtgaagaatgtcaccaactcagaaacccttcttcattgacgtgtccctcactcactctcctctcttcactataaatcgccactcttcgtgttctccacttcaccaactccttcaaacttattaacactttccttagttcaatatggggaagcccttcttcactctctctctttcttccctttgcttgctactcttgtcgagtgcatgctttgctattacctccagcaaagtgccaactcaacaacctcaacgcgttggaacccgaccaccgcgttgagtccgaaggtggtcttattgaaacatggaactctcaacaccctgagctgcaatgcgccggtgtcactgtttccaaacgcaccctcaaccgcaacggcctccacttgccatcttactcaccttatccccaaatgatcattgtcgttcaaggtgcgtaatattagtaagaagtatttatcagcttaacgtgataacaataatagtaatatgaaatatttattaaatttttataattaatctctgctagaaaatttgattaatcattttagtagaatttgttttctcaactaggttttaaaacacca

SEQ ID NO: 4986 - DNA, 666 bp, Artificial
  Mutations within GlyA3B4 introduced by GmGlyA3B4_T03TALE nuclease
gttcatgtacggttgcagatataaacgaagcatagcttatgtatgaggtgtaacaaaattggaaacaatagccatgcaaggtgaagaatgtcaccaactcagaaacccttcttcattgacgtgtccctcactcactctcctctcttcactataaatcgccactcttcgtgttctccacttcaccaactccttcaaacttattaacactttccttagttcaatatggggaagcccttcttcactctctctctttcttccctttgcttgctactcttgtcgagtgcatgctttgctattacctccagcaagttcaagtgccaactcaacaacctcaacgcgttggaacccgaccaccgcgttgagtccgaaggtggtcttattgaaacatggaactctcaacaccctgagctgcaatgcgccggtgtcactgtttccaaacgcaccctcaaccgcaacggcctccacttgccatcttactcaccttatccccaaatgatcattgtcgttcaaggtgcgtaatattagtaagaagtatttatcagcttaacgtgataacaataatagtaatatgaaatatttattaaatttttataattaatctctgctagaaaatttgattaatcattttagtagaatttgttttctcaactaggttttaaaacacca

SEQ ID NO: 4987 - DNA, 554 bp, Artificial
  Mutations within GlyA3B4 introduced by GmGlyA3B4_T03TALE nuclease
gttcatgtacggttgcagatataaacgaagcatagcttatgtatgaggtgtaacaaaattggaaacaatagccatgcaaggtgaagaatgtcaccaactcagaaacccttcttcattgacgtgtccctcactcactctcctctcttcactataaatcgccactcttcgtgttctccacttcaccaactccttcaaacttattaacactttccttagttcaatatggggaagcccttcttcactctctctctttcttccctttgcttgctactcttgtcgagtgcatgctttgctattaaaacatggaactctcaacaccctgagctgcaatgcgccggtgtcactgtttccaaacgcaccctcaaccgcaacggcctccacttgccatcttactcaccttatccccaaatgatcattgtcgttcaaggtgcgtaatattagtaagaagtatttatcagcttaacgtgataacaataatagtaatatgaaatatttattaaattttttataattaatctctgctagaaaattttgattaatcatttttagtagaa

SEQ ID NO: 4988 - DNA, 620 bp, Artificial; identical to SEQ ID NO: 3307
  Mutations within GlyA3B4 introduced by GmGlyA3B4_T03TALE nuclease

SEQ ID NO: 4989 - DNA, 702 bp, Artificial
  Mutations within GlyA3B4 introduced by GmGlyA3B4_T03TALE nuclease
gttcatgtacggttgcagatataaacgaagcatagcttatgtatgaggtgtaacaaaattggaaacaatagccatgcaaggtgaagaatgtcaccaactcagaaacccttcttcattgacgtgtccctcactcactctcctctcttcactataaatcgccactcttcgtgttctccacttcaccaactccttcaaacttattaacactttccttagttcaatatggggaagcccttcttcactctctctctttcttccctttgcttgctactcttgtcgagtgcatgctttgctattacctccagcaatggcgatggccaccacctgctgggggtcaagccgtgggcctggcacagcaccggcaatgccaactcaacaacctcaacgcgttggaacccgaccaccgcgttgagtccgaaggtggtcttattgaaacatggaactctcaacaccctgagctgcaatgcgccggtgtcactgtttccaaacgcaccctcaaccgcaacggcctccacttgccatcttactcaccttatcccaaatgatcattgtcgttcaaggtgcgtaatattagtaatgaagtatttatcagcttaacgtgataacaataatagtaatatgaatatttattaaattttttataaattaatctctgctagaaaatttgaattaatcatttttagtagaatttgtttttctcaa

SEQ ID NO: 4990 - DNA, 650 bp, Artificial
  Mutations within GlyA3B4 introduced by GmGlyA3B4_T03TALE nuclease
gttcatgtacggttgcagatataaacgaagcatagcttatgtatgaggtgtaacaaaattggaaacaatagccatgcaaggtgaagaatgtcaccaactcagaaacccttcttcattgacgtgtccctcactcactctcctctcttcactataaatcgccactcttcgtgttctccacttcaccaactccttcaaacttattaacactttccttagttcaatatggggaagcccttcttcactctctctctttcttccctttgcttgctactcttgtcgagtgcatgctttgctattacctccagcaagtgagtgccaactcaacaacctcaacgcgttggaacccgaccaccgcgttgagtccgaaggtggtcttattgaaacatggaactctcaacaccctgagctgcaatgcgccggtgtcactgtttccaaacgcaccctcaaccgcaacggcctccacttgccatcttactcaccttatccccaaatgatcattgtcgttcaaggtgcgtaatattagtaagaagtatttatcagcttaacgtgataacaatatagtaatatgaaatatttattaaatttttataattaatctctgctagaaaatttgattaatcattttagtagaatttgttttctcaactagg

SEQ ID NO: 4991 - DNA, 647 bp, Artificial
  Mutations within GlyA3B4 introduced by GmGlyA3B4_T03TALE nuclease
gttcatgtacggttgcagatataaacgaagcatagcttatgtatgaggtgtaacaaaattggaaacaatagccatgcaaggtgaagaatgtcaccaactcagaaacccttcttcattgacgtgtccctcactcactctcctctcttcactataaatcgccactcttcgtgttctccacttcaccaactccttcaaacttattaacactttccttagttcaatatggggaagcccttcttcactctctctctttcttccctttgcttgctactcttgtcgagtgcatgctttgctattacctccagcaagtgccaactcaacaacctcaacgcgttggaacccgaccaccgcgttgagtccgaaggtggtcttattgaaacatggaactctcaacaccctgagctgcaatgcgccggtgtcactgtttccaaacgcaccctcaaccgcaacggcctccacttgccatcttactcaccttatccccaaatgatcattgtcgttcaaggtgcgtaatattagtaagaagtatttatcagcttaacgtgataacaataatagtaatatgaaatatttattaaatttttataattaatctctgctagaaaatttgattaatcattttagtagaatttgttttctcaactagg

SEQ ID NO: 4992 - DNA, 620 bp, Artificial
  Mutations within GlyA3B4 introduced by GmGlyA3B4_T03TALE nuclease
gttcatgtacggttgcagatataaacgaagcatagcttatgtatgaggtgtaacaaaattggaaacaatagccatgcaaggtgaagaatgtcaccaactcagaaacccttcttcattgacgtgtccctcactcactctcctctcttcactataaatcgccactcttcgtgttctccacttcaccaactccttcaaacttattaacactttccttagttcaatatggggaagcccttcttcactctctctctttcttccctttgcttgctactcttgtcgagtgcatgctttgctattacctccagcaaaagtgccaactcaacaacctcaacgcgttggaacccgaccaccgcgttgagtccgaaggtggtcttattgaaacatggaactctcaacaccctgagctgcaatgcgccggtgtcactgtttccaaacgcaccctcaaccgcaacggcctccacttgccatcttactcaccttatccccaaatgatcattgtcgttcaaggtgcgtaatattagtaagaagtatttatcagcttaacgtgataacaataatagtaatatgaaatatttattaaatttttataattaatctctgctagaaaatttgattaatca

SEQ ID NO: 4993 - DNA, 661 bp, Artificial
  Mutations within GlyA3B4 introduced by GmGlyA3B4_T03TALE nuclease
gttcatgtacggttgcagatataaacgaagcatagcttatgtatgaggtgtaacaaaattggaaacaatagccatgcaaggtgaagaatgtcaccaactcagaaacccttcttcattgacgtgtccctcactcactctcctctcttcactataaatcgccactcttcgtgttctccacttcaccaactccttcaaacttattaacactttccttagttcaatatggggaagcccttcttcactctctctctttcttccctttgcttgctactcttgtcgagtgcatgctttgctattacctccagcaagtgccaactcaacaacctcaacgcgttggaacccgaccaccgcgttgagtccgaaggtggtcttattgaaacatggaactctcaacaccctgagctgcaatgcgccggtgtcactgtttccaaacgcaccctcaaccgcaacggcctccacttgccatcttactcaccttatccccaaatgatcattgtcgttcaaggtgcgtaatattagtaagaagtatttatcagcttaacgtgataacaataatagtaatatgaaatatttattaaatttttataattaatctctgctagaaaatttgattaatcattttagtagaatttgtttttctcaactaggttttaaaacacca

SEQ ID NO: 4994 - DNA, 560 bp, Artificial
  Mutations within GlyA3B4 introduced by GmGlyA3B4_T03TALE nuclease
gttcatgtacggttgcagatataaacgaagcatagcttatgtatgaggtgtaacaaaattggaaacaatagccatgcaaggtgaagaatgtcaccaactcagaaacccttcttcattgacgtgtccctcactcactctcctctcttcactataaatcgccactcttcgtgttctccacttcaccaactccttcaaacttattaacactttccttagttcaatatggggaagcccttcttcactctctctctttcttccctttgcttgctactcttgtcgagtgcatgctttgctattaccccgaccaccgcgttgagtccgaaggtggtcttattgaaacatggaactctcaacaccctgagctgcaatgcgccggtgtcactgtttccaaacgcaccctcaaccgcaacggccccacttgccatcttactcaccttatccccaaatgatcattgtcgttcaaggtgcgtaatattagtaagaagtatttatcagcttaacgtgataacaataatagtaatatgaaatatttattaatttttataattaatctctgctag

SEQ ID NO: 4995 - DNA, 646 bp, Artificial; identical to SEQ ID NO: 4907
  Mutations within GlyA3B4 introduced by GmGlyA3B4_T03TALE nuclease

SEQ ID NO: 4996 - DNA, 664 bp, Artificial
  Mutations within GlyA3B4 introduced by GmGlyA3B4_T03TALE nuclease
gttcatgtacggttgcagatataaacgaagcatagcttatgtatgaggtgtaacaaaattggaaacaatagccatgcaaggtgaagaatgtcaccaactcagaaacccttcttcattgacgtgtccctcactcactctcctctcttcactataaatcgccactcttcgtgttctccacttcaccaactccttcaaacttattaacactttccttagttcaatatggggaagcccttcttcactctctctctttcttccctttgcttgctactcttgtcgagtgcatgctttgctattacctccagcaagttagtgccaactcaacaacctcaacgcgttggaacccgaccaccgcgttgagtccgaaggtggtcttattgaaacatggaactctcaacaccctgagctgcaatgcgccggtgtcactgtttccaaacgcaccctcaaccgcaacggcctccacttgccatcttactcaccttatccccaaatgatcattgtcgttcaaggtgcgtaatattagtaagaagtatttatcagcttaacgtgataacaataatagtaatatgaaatatttattaaatttttataattaatctctgctagaaaatttgattaatcattttagtagaatttgttttctcaactaggttttaaaacacca

SEQ ID NO: 4997 - DNA, 641 bp, Artificial
  Mutations within GlyA3B4 introduced by GmGlyA3B4_T03TALE nuclease
gttcatgtacggttgcagatataaacgaagcatagcttatgtatgaggtgtaacaaaattggaaacaatagccatgcaaggtgaagaatgtcaccaactcagaaacccttcttcattgacgtgtccctcactcactctcctctcttcactataaatcgccactcttcgtgttctccacttcaccaactccttcaaacttattaacactttccttagttcaatatggggaagcccttcttcactctctctctttcttccctttgcttgctactcttgtcgagtgcatgctttgctattacctccagaacaacctcaacgcgttggaacccgaccaccgcgttgagtccgaaggtggtcttattgaaacatggaactctcaacaccctgagctgcaatgcgccggtgtcactgtttccaaacgcaccctcaaccgcaacggcctccacttgccatcttactcaccttatccccaaatgatcattgtcgttcaaggtgcgtaatattagtaagaagtatttatcagcttaacgtgataacaataatagtaatatgaaatatttattaaatttttataattaatctctgctagaaaatttgattaatcatttttagtagaatttgttttttctcaactaggtttt

SEQ ID NO: 4998 - DNA, 557 bp, Artificial
  Mutations within GlyA3B4 introduced by GmGlyA3B4_T03TALE nuclease
gttcatgtacggttgcagatataaacgaagcatagcttatgtatgaggtgtaacaaaattggaaacaatagccatgcaaggtgaagaatgtcaccaactcagaaacccttcttcattgacgtgtccctcactcactctcctctcttcactataaatcgccactcttcgtgttctccacttcaccaactccttcaaacttattaacactttccttagttcaatatgagtaagttggaacccgaccaccgcgttgagtccgaaggtggtcttattgaaacatggaactctcaacaccctgagctgcaatgcgccggtgtcactgtttccaaacgcaccctcaaccgcaacggcctccacttgccatcttactcaccttatccccaaatgatcattgtcgttcaaggtgcgtaatattagtaagaagtatttatcagcttaacgtgataacaataatagtaatatgaaatatttattaaattttttataattaatctctgctagaaatttgattaatcatttttagtagaatttgtttttctcaactaggtttttaaaca

SEQ ID NO: 4999 - DNA, 426 bp, Artificial; identical to SEQ ID NO: 4777
  Mutations within GlyA3B4 introduced by GmGlyA3B4_T03TALE nuclease

SEQ ID NO: 5000 - DNA, 637 bp, Artificial
  Mutations within GlyA3B4 introduced by GmGlyA3B4_T03TALE nuclease
  misc_feature (532): n is a or c or t or g
gttcatgtacggttgcagatataaacgaagcatagcttatgtatgaggtgtaacaaaattggaaacaatagccatgcaaggtgaagaatgtcaccaactcagaaacccttcttcattgacgtgtccctcactcactctcctctcttcactataaatcgccactcttcgtgttctccacttcaccaactccttcaaacttattaacactttccttagttcaatatggggaagcccttcttcactctctctctttcttccctttgcttgctactcttgtcgagtgcatgctttgctattacctccagcaagttcgagtgccaactcaacaacctcaacgcgttggaacccgaccaccgcgttgagtccgaaggtggtcttattgaaacatggaactctcaacaccctgagctgcaatgcgccggtgtcactgtttccaaacgcaccctcaaccgcaacggcctccacttgccatcttactcaccttatccccaaatgatcattgtcgttcaaggtgcgtaatattagtaagagnatttatcagcttaacgtgataacaatatagtaatatgaaatatttattaaatttttataattaatctctgctagaaaatttgattaatcattttagtagaatttg

SEQ ID NO: 5001 - DNA, 659 bp, Artificial
  Mutations within GlyA3B4 introduced by GmGlyA3B4_T03TALE nuclease
gttcatgtacggttgcagatataaacgaagcatagcttatgtatgaggtgtaacaaaattggaaacaatagccatgcaaggtgaagaatgtcaccaactcagaaacccttcttcattgacgtgtccctcactcactctcctctcttcactataaatcgccactcttcgtgttctccacttcaccaactccttcaaacttattaacactttccttagttcaatatggggaagcccttcttcactctctctctttcttccctttgcttgctactcttgtcgagtgcatgctttgctattacctccagcaatgccaactcaataacctcaacgcgttggaacccgaccaccgcgttgagtccgaaggtggtcttattgaaacatggaactctcaacaccctgagctgcaatgcgccggtgtcactgtttccaaacgcaccctcaaccgcaacggcctccacttgccatcttactcaccttatccccaaatgatcattgtcgttcaaggtgcgtaatattagtaagaagtatttatcagcttaacgtgataacaataatagtaatatgaaatatttattaaatttttataattaatctctgctagaaaatttgattaatcattttagtagaatttgttttctcaactaggttttaaaacacca

SEQ ID NO: 5002 - DNA, 601 bp, Artificial
  Mutations within GlyA3B4 introduced by GmGlyA3B4_T03TALE nuclease
gttcatgtacggttgcagatataaacgaagcatagcttatgtatgaggtgtaacaaaattggaaacaatagccatgcaaggtgaagaatgtcaccaactcagaaacccttcttcattgacgtgtccctcactcactctcctctcttcactataaatcgccactcttcgtgttctccacttcaccaactccttcaaacttattaacactttccttagttcaatatggggaagcccttcttcactctctctctttcttccctttgcttgctactcttgtcgagtgcatgctttgctattacctccagcaagttcaacgtttgaaggtggtcttattgaaacatggaactctcaacaccctgagctgcaatgcgccggtgtcactgtttccaaacgcaccctcaaccgcaacggcctccacttgccatcttactcaccttatccccaaatgatcattgtcgttcaaggtgcgtaatattagtaagaagtatttatcagcttaacgtgataacaataatagtaatatgaatatttattaatttttataattaatctctgctagaaaatttgattaatcatttttagtagaatttgtttttctcaa

SEQ ID NO: 5003 - DNA, 642 bp, Artificial
  Mutations within GlyA3B4 introduced by GmGlyA3B4_T03TALE nuclease
gttcatgtacggttgcagatataaacgaagcatagcttatgtatgaggtgtaacaaaattggaaacaatagccatgcaaggtgaagaatgtcaccaactcagaaacccttcttcattgacgtgtccctcactcactctcctctcttcactataaatcgccactcttcgtgttctccacttcaccaactccttcaaacttattaacactttccttagttcaatatggggaagcccttcttcactctctctctttcttccctttgcttgctactcttgtcgagtgcatgctttgctattacctccagcaagttgccaactcaacaacctcaacgcgttggaacccgaccaccgcgttgagtccgaaggtggtcttattgaaacatggaactctcaacaccctgagctgcaatgcgccggtgtcactgtttccaaacgcaccctcaaccgcaacggcctccacttgccatcttactcaccttatccccaaatgatcattgtcgttcaaggtgcgtaatattagtaagaagtatttatcagcttaacgtgataacaatatagtaatatgaaatatttattaaatttttataattaatctctgctagaaaatttgattaatcattttagtagaatttgttttctcaa

SEQ ID NO: 5004 - DNA, 520 bp, Artificial
  Mutations within GlyA3B4 introduced by GmGlyA3B4_T03TALE nuclease
gttcatgtacggttgcagatataaacgaagcatagcttatgtatgaggtgtaacaaaattggaaacaatagccatgcaaggtgaagaatgtcaccaactcagaaacccttcttcattgacgtgtccctcactcactctcctctcttcactataaatcgccactcttcgtgttctccacttcaccaactccttcaaacttgccaactcaacaacctcaacgcgttggaacccgaccaccgcgttgagtccgaaggtggtcttattgaaacatggaactctcaacaccctgagctgcaatgcgccggtgtcactgttcccaaacgcaccctcaaccgcaacggcctccacttgccatcttactcaccttatccccaaatgatcattgtcgttcaaggtgcgtaatattagtaagaagtatttatcagcttaacgtgataacaataatagtaatatgaaatatttattaaattttttataattaatctctgctagaaaatttgattaatcatttttagtagaa

SEQ ID NO: 5005 - DNA, 647 bp, Artificial; identical to SEQ ID NO: 4991
  Mutations within GlyA3B4 introduced by GmGlyA3B4_T03TALE nuclease

SEQ ID NO: 5006 - DNA, 631 bp, Artificial; identical to SEQ ID NO: 4898
  Mutations within GlyA3B4 introduced by GmGlyA3B4_T03TALE nuclease

SEQ ID NO: 5007 - DNA, 614 bp, Artificial
  Mutations within GlyA3B4 introduced by GmGlyA3B4_T03TALE nuclease
gttcatgtacggttgcagatataaacgaagcatagcttatgtatgaggtgtaacaaaattggaaacaatagccatgcaaggtgaagaatgtcaccaactcagaaacccttcttcattgacgtgtccctcactcactctcctctcttcactataaatcgccactcttcgtgttctccacttcaccaactccttcaaacttattaacactttccttagttcaatatggggaagcccttcttcactctctctctttcttccctttgcttgctactcttgtcgagtgcatgctttgctattacctccagcaatgcgccgcgttgagtccgaaggtggtcttattgaaacatggaactctcaacaccctgagctgcaatgcgccggtgtcactgtttccaaacgcaccctcaaccgcaacggcctccacttgccatcttactcaccttatccccaaatgatcattgtcgttcaaggtgcgtaatattagtaagaagtatttatcagcttaacgtgataacaataatagtaatatgaaatatttattaattttttataattaatctctgctagaaaatttgattaatcatttttagtagaatttgtttttctcaactagg

SEQ ID NO: 5008 - DNA, 653 bp, Artificial
  Mutations within GlyA3B4 introduced by GmGlyA3B4_T03TALE nuclease
gttcatgtacggttgcagatataaacgaagcatagcttatgtatgaggtgtaacaaaattggaaacaatagccatgcaaggtgaagaatgtcaccaactcagaaacccttcttcattgacgtgtccctcactcactctcctctcttcactataaatcgccactcttcgtgttctccacttcaccaactccttcaaacttattaacactttccttagttcaatatggggaagcccttcttcactctctctctttcttccctttgcttgctactcttgtcgagtgcatgctttgctattacctccagcaagtccaagctactcaacaacctcaacgcgttggaacccgaccaccgcgttgagtccgaaggtggtcttattgaaacatggaactctcaacaccctgagctgcaatgcgccggtgtcactgtttccaaacgcaccctcaaccgcaacggcctccacttgccatcttactcaccttatccccaaatgatcattgtcgttcaaggtgcgtaatattagtaagaagtatttatcagcttaacgtgataacaatatagtaatatgaaatatttattaaatttttataattaatctctgctagaaaatttgattaatcattttagtagaatttgtttttctcaactaggttt

SEQ ID NO: 5009 - DNA, 637 bp, Artificial
  Mutations within GlyA3B4 introduced by GmGlyA3B4_T03TALE nuclease
gttcatgtacggttgcagatataaacgaagcatagcttatgtatgaggtgtaacaaaattggaaacaatagccatgcaaggtgaagaatgtcaccaactcagaaacccttcttcattgacgtgtccctcactcactctcctctcttcactataaatcgccactcttcgtgttctccacttcaccaactccttcaaacttattaacactttccttagttcaatatggggaagcccttcttcactctctctctttcttccctttgcttgctactcttgtcgagtgcatgctttgccaactcaacaacctcaacgcgttggaacccgaccaccgcgttgagtccgaaggtggtcttattgaaacatggaactctcaacacccctgagctgcaatgcgccggtgtcactgtttccaaacgcaccctcaaccgcaacggcctccacttgccatcttactcaccttatccccaaatgatcattgtcgttcaaggtgcgtaatattagtaagaagtatttatcagcttaacgtgataacaataatagtaatatgaaatatttattaaattttttataattaatctctgctagaaaatttgattaatcatttttagtagaatttgttttttctcaactaggtttt

SEQ ID NO: 5010 - DNA, 616 bp, Artificial
  Mutations within GlyA3B4 introduced by GmGlyA3B4_T03TALE nuclease
gttcatgtacggttgcagatataaacgaagcatagcttatgtatgaggtgtaacaaaattggaaacaatagccatgcaaggtgaagaatgtcaccaactcagaaacccttcttcattgacgtgtccctcactcactctcctctcttcactataaatcgccactcttcgtgttctccacttcaccaactccttcaaacttattaacactttccttagttcaatatggggaagcccttcttcactctctctctttcttccctttgcttgctactcttgtcgagtgccaactcaacaacctcaacgcgttggaacccgaccaccgcgttgagtccgaaggtggtcttattgaaacatggaactctcaacaccctgagctgcaatgcgccggtgtcactgtttccaaacgcaccctcaaccgcaacggcctccacttgccatcttactcaccttatccccaaatgatcattgtcgttcaaggtgcgtaatattagtaagaagtatttatcagcttaacgtgataacaataatagtaatatgaaatatttattaatttttataattaatctctgctagaaaatttgattaatcatttttagtagaatttgtttttctcaac

SEQ ID NO: 5011 - DNA, 650 bp, Artificial
  Mutations within GlyA3B4 introduced by GmGlyA3B4_T03TALE nuclease
gttcatgtacggttgcagatataaacgaagcatagcttatgtatgaggtgtaacaaaattggaaacaatagccatgcaaggtgaagaatgtcaccaactcagaaacccttcttcattgacgtgtccctcactcactctcctctcttcactataaatcgccactcttcgtgttctccacttcaccaactccttcaaacttattaacactttccttagttcaatatggggaagcccttcttcactctctctctttcttccctttgcttgctactcttgtcgagtgcatgctttgctattacctccagcaagttgccaactcaacaacctcaacgcgttggaacccgaccaccgcgttgagtccgaaggtggtcttattgaaacatggaactctcaacaccctgagctgcaatgcgccggtgtcactgtttccaaacgcaccctcaaccgcaacggcctccacttgccatcttactcaccttatccccaaatgatcattgtcgttcaaggtgcgtaatattagtaagaagtatttatcagcttaacgtgataacaataatagtaatatgaaatatttattaaatttttataaattaatctctgctagaaaatttgattaatcattttagtagaatttgtttttctcaactagg

SEQ ID NO: 5012 - DNA, 641 bp, Artificial
  Mutations within GlyA3B4 introduced by GmGlyA3B4_T03TALE nuclease
gttcatgtacggttgcagatataaacgaagcatagcttatgtatgaggtgtaacaaaattggaaacaatagccatgcaaggtgaagaatgtcaccaactcagaaacccttcttcattgacgtgtccctcactcactctcctctcttcactataaatcgccactcttcgtgttctccacttcaccaactccttcaaacttattaacactttccttagttcaatatggggaagcccttcttcactctctctctttcttccctttgcttgctactcttgtcgagtgcatgccaactcaacaacctcaacgcgttggaacccgaccaccgcgttgagtccgaaggtggtcttattgaaacatggaactctcaacaccctgagctgcaatgcgccggtgtcactgtttccaaacgcaccctcaaccgcaacggcctccacttgccatcttactcaccttatccccaaatgatcattgtcgttcaaggtgcgtaatattagtaagaagtatttatcagcttaacgtgataacaataatagtaatatgaaatatttattaaattttttataattaatctctgctagaaaatttgattaatcatttttagtagaatttgttttttctcaactaggttttaaacaccaca

SEQ ID NO: 5013 - DNA, 645 bp, Artificial
  Mutations within GlyA3B4 introduced by GmGlyA3B4_T03TALE nuclease
gttcatgtacggttgcagatataaacgaagcatagcttatgtatgaggtgtaacaaaattggaaacaatagccatgcaaggtgaagaatgtcaccaactcagaaacccttcttcattgacgtgtccctcactcactctcctctcttcactataaatcgccactcttcgtgttctccacttcaccaactccttcaaacttattaacactttccttagttcaatatggggaagcccttcttcactctctctctttcttccctttgcttgctactcttgtcgagtgcatgctttgctattacctccagcaagttgtgccaactcaacaacctcaacgcgttggaacccgaccaccgcgttgagtccgaaggtggtcttattgaaacatggaactctcaacaccctgagctgcaatgcgccggtgtcactgtttccaaacgcaccctcaaccgcaacggcctccacttgccatcttactcaccttatccccaaatgatcattgtcgttcaaggtgcgtaatattagtaagaagtatttatcagcttaacgtgataacaataatagtaatatgaaatatttattaaatttttataattaatctctgctagaaaatttgattaatcattttagtagaatttgttttctcaa

SEQ ID NO: 5014 - DNA, 672 bp, Artificial
  Mutations within GlyA3B4 introduced by GmGlyA3B4_T03TALE nuclease
gttcatgtacggttgcagatataaacgaagcatagcttatgtatgaggtgtaacaaaattggaaacaatagccatgcaaggtgaagaatgtcaccaactcagaaacccttcttcattgacgtgtccctcactcactctcctctcttcactataaatcgccactcttcgtgttctccacttcaccaactccttcaaacttattaacactttccttagttcaatatgggggaagcccttcttcactctctctctttcttccctttgcttgctactcttgtcgagtgcatgctttgctattacctccagcaagttcgcgtgccacctacaatcaacctcaacagcgttggaacccgaccaccgcgttgagtccgaaggtggtcttattgaaacatggaactctcaacaccctgagctgcaatgcgccggtgtcactgtttccaaacgcaccctcaaccgcaacggcctccacttgccatcttactcaaccttatccccaaatgatcattgtcgttcaaggtgcgtaatattagtaagagtatttatcagcttaacgtgatacaataatagtaatatgaaatatttattaaatttttataattaatctctgctagaaaatttgattaatcattttagtagaatttgtttttctcaactaggtttttaaaacaccaa

SEQ ID NO: 5015 - DNA, 664 bp, Artificial; identical to SEQ ID NO: 4996
  Mutations within GlyA3B4 introduced by GmGlyA3B4_T03TALE nuclease

SEQ ID NO: 5016 - DNA, 637 bp, Artificial
  Mutations within GlyA3B4 introduced by GmGlyA3B4_T03TALE nuclease
gttcatgtacggttgcagatataaacgaagcatagcttatgtatgaggtgtaacaaaattggaaacaatagccatgcaaggtgaagaatgtcaccaactcagaaacccttcttcattgacgtgtccctcactcactctcctctcttcactataaatcgccactcttcgtgttctccacttcaccaactccttcaaacttattaacactttccttagttcaatatggggaagcccttcttcactctctctctttcttccctttgcttgctactcttgtcgagtgcatgctttgctattacctccagcaagttcatgccaactcaacaacctcaacgcgttggaacccgaccaccgcgttgagtccgaaggtggtcttattgaaacatggaactctcaacaccctgagctgcaatgcgccggtgtcactgtttccaaacgcaccctcaaccgcaacggcctccacttgccatcttactcaccttatccccaaatgatcattgtcgttcaaggtgcgtaatattagtaagaagtatttatcagcttaacgtgataacaataatagtaatatgaaatatttattaaatttttataattaatctctgctagaaaatttgattaatcattttagtagaatttg

SEQ ID NO: 5017 - DNA, 463 bp, Artificial
  Mutations within GlyA3B4 introduced by GmGlyA3B4_T03TALE nuclease
gttcatgtacggttgcagatataaacgaagcatagcttatgtatgaggtgtaacaaaattggaaacaatagccatgcaaggtgaagaatgtcaccaactcagaaacccttcttcattgacgtgtccctcactcactctcctctcttcactataaatcgccactcttcgtgttctccacttcaccaactccttcaaacttattaacactttccttagttcaatatggggaagcccttcttcactctctctctttcttccctttgcttgctactcttgtcgagtgcatgctttgctattacctccaactcaacaacctcaacgcgttggaacccgaccaccgcgttgagtccgaaggtggtcttattgaaacatggaactctcacacctcgagctgcaatgcgccggtgtcactgtttccaaacgcatccctcaaccgcaacggcctccacttgccatcttactc

SEQ ID NO: 5018 - DNA, 640 bp, Artificial
  Mutations within GlyA3B4 introduced by GmGlyA3B4_T03TALE nuclease
gttcatgtacggttgcagatataaacgaagcatagcttatgtatgaggtgtaacaaaattggaaacaatagccatgcaaggtgaagaatgtcaccaactcagaaacccttcttcattgacgtgtccctcactcactctcctctcttcactataaatcgccactcttcgtgttctccacttcaccaactccttcaaacttattaacactttccttagttcaatatggggaagcccttcttcactctctctctttcttccctttgcttgctactcttgtcgagtgcatgctttgctattacctcaacgcgttggaacccgaccaccgcgttgagtccgaaggtggtcttattgaaacatggaactctcaacaccctgagctgcaatgcgccggtgtcactgtttccaaacgcaccctcaaccgcaacggcctccacttgccatcttactcaccttatccccaaatgatcattgtcgttcaaggtgcgtaatattagtaagaagtatttatcagcttaacgtgataacaataatagtaatatgaaatatttattaaattttttataattaatctctgctagaaaatttgattaatcatttttagtagaatttgttttttctcaactaggttttaaacaccaca

SEQ ID NO: 5019 - DNA, 647 bp, Artificial
  Mutations within GlyA3B4 introduced by GmGlyA3B4_T03TALE nuclease
gttcatgtacggttgcagatataaacgaagcatagcttatgtatgaggtgtaacaaaattggaaacaatagccatgcaaggtgaagaatgtcaccaactcagaaacccttcttcattgacgtgtccctcactcactctcctctcttcactataaatcgccactcttcgtgttctccacttcaccaactccttcaaacttattaacactttccttagttcaatatggggaagcccttcttcactctctctctttcttccctttgcttgctactcttgtcgagtgcatgctttgctattacctccagcaagttcaatgccaactcaacaacctcaacgcgttggaacccgaccaccgcgttgagtccgaaggtggtcttattgaaacatggaactctcaacaccctgagctgcaatgcgccggtgtcactgtttccaaacgcaccctcaaccgcaacggcctccacttgccatcttactcaccttatccccaaatgatcattgtcgttcaaggtgcgtaatattagtaagaagtatttatcagcttaacgtgataacaataatagtaatatgaaatatttattaaatttttataattaatctctgctagaaaatttgattaatcattttagtagaatttgttttctcaa

SEQ ID NO: 5020 - DNA, 424 bp, Artificial
  Mutations within GlyA3B4 introduced by GmGlyA3B4_T03TALE nuclease
gttcatgtacggttgcagatataaacgaagcatagcttatgtatgaggtgtaacaaaattggaaacaatagccatgcaaggtgaagaatgtcaccaactcagaaacccttcttcattgacgtgtccctcactcactctcctctcttcactataaatcgccactcttcgtgttctccacttcaccaactccttcaaacttattaacactttccttagttcaatatggggaagcccttcttcactctctctctttcttccctttgcttgctactcttgtcgagtgcatgctttgctattacctccagcaagtaagcttaacgtgataacaataatagtaatatgaaatatttattaaattttttataattaatctctgctagaaaatttgattaatcatttttagtagaattttgtttttctcaac

SEQ ID NO: 5021 - DNA, 543 bp, Artificial
  Mutations within GlyA3B4 introduced by GmGlyA3B4_T03TALE nuclease
gttcatgtacggttgcagatataaacgaagcatagcttatgtatgaggtgtaacaaaattggaaacaatagccatgcaaggtgaagaatgtcaccaactcagaaacccttcttcattgacgtgtccctcactcactctcctctcttcactataaatcgccactcttcgtgttctccacttcaccaactccttcaaacttattaacactttccttagttcaatatggggaagcccttcttcactctctctctttcttccctttgcttgctctcaacaccctgagctgcaatgcgccggtgtcactgtttccaaacgcaccctcaaccgcaacggcctccacttgccatcttactcaccttatccccaaatgatcattgtcgttcaaggtgcgtaatattagtaagaagtatttatcagcttaacgtgataacaataatagtaatatgaaatatttattaaattttttataattaatctctgctagaaaatttgattaatcatttttagtagaatttgtttttctcaactaggtttttaaacacc

SEQ ID NO: 5022 - DNA, 634 bp, Artificial
  Mutations within GlyA3B4 introduced by GmGlyA3B4_T03TALE nuclease
gttcatgtacggttgcagatataaacgaagcatagcttatgtatgaggtgtaacaaaattggaaacaatagccatgcaaggtgaagaatgtcaccaactcagaaacccttcttcattgacgtgtccctcactcactctcctctcttcactataaatcgccactcttcgtgttctccacttcaccaactccttcaaacttattaacactttccttagttcaatatggggaagcccttcttcactctctctctttcttccctttgcttgctactcttgtcgagtgcatgctttgctattacctccagcaagtagtgccaactcaacaacctcaacgcgttggaacccgaccaccgcgttgagtccgaaggtggtcttattgaaacatggaactctcaacaccctgagctgcaatgcgccggtgtcactgtttccaaacgcaccctcaaccgcaacggcctccacttgccatcttactcaccttatccccaaatgatcattgtcgttcaaggtgcgtaatattagtaagaagtatttatcagcttaacgtgataacaatatagtaatatgaaatatttattaaatttttataattaatctctgctagaaaatttgattaatcattttagtagaattt

SEQ ID NO: 5023 - DNA, 648 bp, Artificial; identical to SEQ ID NO: 4974
  Mutations within GlyA3B4 introduced by GmGlyA3B4_T03TALE nuclease

SEQ ID NO: 5024 - DNA, 662 bp, Artificial
  Mutations within GlyA3B4 introduced by GmGlyA3B4_T03TALE nuclease
gttcatgtacggttgcagatataaacgaagcatagcttatgtatgaggtgtaacaaaattggaaacaatagccatgcaaggtgaagaatgtcaccaactcagaaacccttcttcattgacgtgtccctcactcactctcctctcttcactataaatcgccactcttcgtgttctccacttcaccaactccttcaaacttattaacactttccttagttcaatatggggaagcccttcttcactctctctctttcttccctttgcttgctactcttgtcgagtgcatgctttgctattacctccagcaagttcatgccaactcaacaacctcaacgcgttggaacccgaccaccgcgttgagtccgaaggtggtcttattgaaacatggaactctcaacaccctgagctgcaatgcgccggtgtcactgtttccaaacgcaccctcaaccgcaacggcctccacttgccatcttactcaccttatccccaaatgatcattgtcgttcaaggtgcgtaatattagtaagaagtatttatcagcttaacgtgatacaatatagtaatatgaaatatttattaaatttttataattaatctctgctagaaaatttgattaatcattttagtagaatttgttttctcaactaggttttaaaacacca

SEQ ID NO: 5025 - DNA, 657 bp, Artificial
  Mutations within GlyA3B4 introduced by GmGlyA3B4_T03TALE nuclease
gttcatgtacggttgcagatataaacgaagcatagcttatgtatgaggtgtaacaaaattggaaacaatagccatgcaaggtgaagaatgtcaccaactcagaaacccttcttcattgacgtgtccctcactcactctcctctcttcactataaatcgccactcttcgtgttctccacttcaccaactccttcaaacttattaacactttccttagttcaatatggggaagcccttcttcactctctctctttcttccctttgcttgctactcttgtcgagtgcatgctttgctattacctccagcatgccaactcaacaacctcaacgcgttggaacccgaccaccgcgttgagtccgaaggtggtcttattgaaacatggaactctcaacaccctgagctgcaatgcgccggtgtcactgtttccaaacgcaccctcaaccgcaacggcctccacttgccatcttactcaccttatccccaaatgatcattgtcgttcaaggtgcgtaatattagtaagaagtatttatcagcttaacgtgataacaatatagtaatatgaaatatttattaaatttttataattaatctctgctagaaaatttgattaatcattttagtagaatttgttttctcaactaggttttaaaacacca

SEQ ID NO: 5026 - DNA, 646 bp, Artificial
  Mutations within GlyA3B4 introduced by GmGlyA3B4_T03TALE nuclease
gttcatgtacggttgcagatataaacgaagcatagcttatgtatgaggtgtaacaaaattggaaacaatagccatgcaaggtgaagaatgtcaccaactcagaaacccttcttcattgacgtgtccctcactcactctcctctcttcactataaatcgccactcttcgtgttctccacttcaccaactccttcaaacttattaacactttccttagttcaatatggggaagcccttcttcactctctctctttcttccctttgcttgctactcttgtcgagtgcatgctttgctattacctccagcaagttcaaggccaactcaacaacctcaacgcgttggaacccgaccaccgcgttgagtccgaaggtggtcttattgaaacatggaactctcaacaccctgagctgcaatgcgccggtgtcactgtttccaaacgcaccctcaaccgcaacggcctccacttgccatcttactcaccttatccccaaatgatcattgtcgttcaaggtgcgtaatattagtaagaagtatttatcagcttaacgtgataacaatatagtaatatgaaatatttattaaatttttataattaatctctgctagaaaatttgattaatcattttagtagaatttgttttctcaa

SEQ ID NO: 5027 - DNA, 655 bp, Artificial
  Mutations within GlyA3B4 introduced by GmGlyA3B4_T03TALE nuclease
gttcatgtacggttgcagatataaacgaagcatagcttatgtatgaggtgtaacaaaattggaaacaatagccatgcaaggtgaagaatgtcaccaactcagaaacccttcttcattgacgtgtccctcactcactctcctctcttcactataaatcgccactcttcgtgttctccacttcaccaactccttcaaacttattaacactttccttagttcaatatggggaagcccttcttcactctctctctttcttccctttgcttgctactcttgtcgagtgcatgctttgctattacctccagcaagactcaacaacctcaacgcgttggaacccgaccaccgcgttgagtccgaaggtggtcttattgaaacatggaactctcaacaccctgagctgcaatgcgccggtgtcactgtttccaaacgcaccctcaaccgcaacggcctccacttgccatcttactcaccttatccccaaatgatcattgtcgttcaaggtgcgtaatattagtaagaagtatttatcagcttaacgtgataacaataatagtaatatgaaatatttattaaatttttataattaatctctgctagaaaatttgattaatcattttagtagaatttgttttctcaactaggttttaaaacacca

SEQ ID NO: 5028 - DNA, 644 bp, Artificial
  Mutations within GlyA3B4 introduced by GmGlyA3B4_T03TALE nuclease
gttcatgtacggttgcagatataaacgaagcatagcttatgtatgaggtgtaacaaaattggaaacaatagccatgcaaggtgaagaatgtcaccaactcagaaacccttcttcattgacgtgtccctcactcactctcctctcttcactataaatcgccactcttcgtgttctccacttcaccaactccttcaaacttattaacactttccttagttcaatatggggaagcccttcttcactctctctctttcttccctttgcttgctactcttgtcgagtgcatgctttgctattacctccagcaaccaactcaacaacctcaacgcgttggaacccgaccaccgcgttgagtccgaaggtggtcttattgaaacatggaactctcaacaccctgagctgcaatgcgccggtgtcactgtttccaaacgcaccctcaaccgcaacggcctccacttgccatcttactcaccttatccccaaatgatcattgtcgttcaaggtgcgtaatattagtaagaagtatttatcagcttaacgtgataacaataatagtaatatgaaatatttattaaatttttataattaatctctgctagaaaatttgattaatcattttagtagaatttgttttctcaactagg

SEQ ID NO: 5029 - DNA, 663 bp, Artificial
  Mutations within GlyA3B4 introduced by GmGlyA3B4_T03TALE nuclease
  misc_feature (529): n is a or c or t or g
gttcatgtacggttgcagatataaacgaagcatagcttatgtatgaggtgtaacaaaattggaaacaatagccatgcaaggtgaagaatgtcaccaactcagaaacccttcttcattgacgtgtccctcactcactctcctctcttcactataaatcgccactcttcgtgttctccacttcaccaactccttcaaacttattaacactttccttagttcaatatggggaagcccttcttcactctctctctttcttccctttgcttgctactcttgtcgagtgcatgctttgctattacctccagcaacgagtgccaactcaacaacctcaacgcgttggaacccgaccaccgcgttgagtccgaaggtggtcttattgaaacatggaactctcaacaccctgagctgcaatgcgccggtgtcactgtttccaaacgcaccctcaaccgcaacggcctccacttgccatcttactcaccttatccccaaatgatcattgtcgttcaaggtgcgtaatattagtaagagnatttatcagcttaacgtgataacaataatagtaatatgaaatatttattaaatttttataattaatctctgctagaaaatttgattaatcattttagtagaatttgtttttctcaactaggttttaaaacacca

SEQ ID NO: 5030 - DNA, 617 bp, Artificial; identical to SEQ ID NO: 2437
  Mutations within GlyA3B4 introduced by GmGlyA3B4_T03TALE nuclease

SEQ ID NO: 5031 - DNA, 656 bp, Artificial
  Mutations within GlyA3B4 introduced by GmGlyA3B4_T03TALE nuclease
gttcatgtacggttgcagatataaacgaagcatagcttatgtatgaggtgtaacaaaattggaaacaatagccatgcaaggtgaagaatgtcaccaactcagaaacccttcttcattgacgtgtccctcactcactctcctctcttcactataaatcgccactcttcgtgttctccacttcaccaactccttcaaacttattaacactttccttagttcaatatggggaagcccttcttcactctctctctttcttccctttgcttgctactcttgtcgagtgcatgctttgctattacctccagcaagttcaacaacctcaacgcgttggaacccgaccaccgcgttgagtccgaaggtggtcttattgaaacatggaactctcaacaccctgagctgcaatgcgccggtgtcactgtttccaaacgcaccctcaaccgcaacggcctccacttgccatcttactcaccttatccccaaatgatcattgtcgttcaaggtgcgtaatattagtaagaagtatttatcagcttaacgtgataacaataatagtaatatgaaatatttattaaatttttataattaatctctgctagaaaatttgattaatcatttttagtagaatttgttttttctcaactaggttttaaacacca

SEQ ID NO: 5032 - DNA, 660 bp, Artificial
  Mutations within GlyA3B4 introduced by GmGlyA3B4_T03TALE nuclease
gttcatgtacggttgcagatataaacgaagcatagcttatgtatgaggtgtaacaaaattggaaacaatagccatgcaaggtgaagaatgtcaccaactcagaaacccttcttcattgacgtgtccctcactcactctcctctcttcactataaatcgccactcttcgtgttctccacttcaccaactccttcaaacttattaacactttccttagttcaatatggggaagcccttcttcactctctctctttcttccctttgcttgctactcttgtcgagtgcatgctttgctattacctccagcaagtcagtgccaactcaacaacctcaacgcgttggaacccgaccaccgcgttgagtccgaaggtggtcttattgaaacatggaactctcaacaccctgagttgcaatgcgccggtgtcactgtttccaaacgcaccctcaaccgcaacggcctccacttgccatcttactcaccttatccccaaatgatcattgtcgttcaaggtgcgtaatattagtaagaagtatttatcagcttaacgtgataacaataatagtaatatgaaatatttattaaatttttataatttaatctctgctagaaaatttgattaatcattttagtagaatttgttttctcaactaggttttaaaa

SEQ ID NO: 5033 - DNA, 660 bp, Artificial; identical to SEQ ID NO: 4874
  Mutations within GlyA3B4 introduced by GmGlyA3B4_T03TALE nuclease

SEQ ID NO: 5034 - DNA, 650 bp, Artificial
  Mutations within GlyA3B4 introduced by GmGlyA3B4_T03TALE nuclease
  misc_feature (531): n is a or c or t or g
gttcatgtacggttgcagatataaacgaagcatagcttatgtatgaggtgtaacaaaattggaaacaatagccatgcaaggtgaagaatgtcaccaactcagaaacccttcttcattgacgtgtccctcactcactctcctctcttcactataaatcgccactcttcgtgttctccacttcaccaactccttcaaacttattaacactttccttagttcaatatggggaagcccttcttcactctctctctttcttccctttgcttgctactcttgtcgagtgcatgctttgctattacctccagcaagttcaacgccaactcaacaacctcaacgcgttggaacccgaccaccgcgttgagtccgaaggtggtcttattgaaacatggaactctcaacaccctgagctgcaatgcgccggtgtcactgtttccaaacgcaccctcaaccgcaacggcctccacttgccatcttactcaccttatccccaaatgatcattgtcgttcaaggtgcgtaatattagtaagagnatttatcagcttaacgtgataacaatatagtaatatgaaatatttattaaatttttataattaatctctgctagaaaatttgattaatcattttagtagaatttgttttctcaactagg

SEQ ID NO: 5035 - DNA, 660 bp, Artificial; identical to SEQ ID NO: 4874
  Mutations within GlyA3B4 introduced by GmGlyA3B4_T03TALE nuclease

SEQ ID NO: 5036 - DNA, 583 bp, Artificial
  Mutations within GlyA3B4 introduced by GmGlyA3B4_T03TALE nuclease
gttcatgtacggttgcagatataaacgaagcatagcttatgtatgaggtgtaacaaaattggaaacaatagccatgcaaggtgaagaatgtcaccaactcagaaacccttcttcattgacgtgtccctcactcactctcctctcttcactataaatcgccactcttcgtgttctccacttcaccaactccttcaaacttattaacactttccttagttcaatatggggaagcccttcttcactctctctctttcttcaacaacctcaacgcgttggaacccgaccaccgcgttgagtccgaaggtggtcttattgaaacatggaactctcaacaccctgagctgcaatgcgccggtgtcactgtttccaaacgcaccctcaaccgcaacggcctccacttgccatcttactcaccttatccccaaatgatcattgtcgttcaaggtgcgtaatattagtaagaagtatttatcagcttaacgtgataacaataatagtaatatgaaatatttattaaatttttataattaatctctgctagaaaatttgattaatcatttttagtagaatttgtttttctcaa

SEQ ID NO: 5037 - DNA, 643 bp, Artificial
  Mutations within GlyA3B4 introduced by GmGlyA3B4_T03TALE nuclease
gttcatgtacggttgcagatataaacgaagcatagcttatgtatgaggtgtaacaaaattggaaacaatagccatgcaaggtgaagaatgtcaccaactcagaaacccttcttcattgacgtgtccctcactcactctcctctcttcactataaatcgccactcttcgtgttctccacttcaccaactccttcaaacttattaacactttccttagttcaatatggggaagcccttcttcactctctctctttcttccctttgcttgctactcttgtcgagtgcatgctttgctattacctccagcaagagtgccaactcaacaacctcaacgcgttggaacccgaccaccgcgttgagtccgaaagtggtcttattgaacatggaactctcaacaccctgagctgcaatgcgccggtgtcactgtttccaaacgcaccctcaaccgcaacggcctccacttgccatcttactcaccttatccccaaatgatcattgtcgttcaaggtgcgtaatattagtaagaagtatttatcagcttaacgtgataacaatatagtaatatgaaatatttattaaatttttataatttaatctctgctagaaaatttgattaatcattttagtagaatttgttttctcaa

SEQ ID NO: 5038 - DNA, 645 bp, Artificial
  Mutations within GlyA3B4 introduced by GmGlyA3B4_T03TALE nuclease
gttcatgtacggttgcagatataaacgaagcatagcttatgtatgaggtgtaacaaaattggaaacaatagccatgcaaggtgaagaatgtcaccaactcagaaacccttcttcattgacgtgtccctcactcactctcctctcttcactataaatcgccactcttcgtgttctccacttcaccaactccttcaaacttattaacactttccttagttcaatatggggaagcccttcttcactctctctctttcttccctttgcttgctactcttgtcgagtgcatgctttgctattacctccagcaagtgtgccaactcaacaacctcaacgcgttggaacccgaccaccgcgttgagtccgaaggtggtcttattgaaacatggaactctcaacaccctgagctgcaatgcgccggtgtcactgtttccaaacgcaccctcaaccgcaacggcctccacttgccatcttactcaccttatccccaaatgatcattgtcgttcaaggtgcgtaatattagtaagaagtatttatcagcttaacgtgataacaataatagtaatatgaaatatttattaaatttttataattaatctctgctagaaaatttgattaatcattttagtagaatttgtttttctcaa

SEQ ID NO: 5039 - DNA, 669 bp, Artificial
  Mutations within GlyA3B4 introduced by GmGlyA3B4_T03TALE nuclease
gttcatgtacggttgcagatataaacgaagcatagcttatgtatgaggtgtaacaaaattggaaacaatagccatgcaaggtgaagaatgtcaccaactcagaaacccttcttcattgacgtgtccctcactcactctcctctcttcactataaatcgccactcttcgtgttctccacttcaccaactccttcaaacttattaacactttccttagttcaatatggggaagcccttcttcactctctctctttcttccctttgcttgctactcttgtcgagtgcatgctttgctattacctccagcaagttcaacgtgccaactcaacaacctcaacgcgttggaacccgaccaccgcgttgagtccgaaggtggtcttattgaaacatggaactctcaacaccctgagctgcaatgcgccggtgtcactgtttccaaacgcaccctcaaccgcaacggcctccacttgccatcttactcaccttatccccaaatgatcattgtcgttcaaggtgcgtaatattagtaagagtatttatcagcttaacgtgataacaatatagtaatatgaaatatttattaaatttttataattaatctctgctagaaaatttgattaatcattttagtagaatttgtttttctcaactaggtttttaaaacaccaca

SEQ ID NO: 5040 - DNA, 665 bp, Artificial
  Mutations within GlyA3B4 introduced by GmGlyA3B4_T03TALE nuclease
gttcatgtacggttgcagatataaacgaagcatagcttatgtatgaggtgtaacaaaattggaaacaatagccatgcaaggtgaagaatgtcaccaactcagaaacccttcttcattgacgtgtccctcactcactctcctctcttcactataaatcgccactcttcgtgttctccacttcaccaactccttcaaacttattaacactttccttagttcaatatggggaagcccttcttcactctctctctttcttccctttgcttgctactcttgtcgagtgcatgctttgctattacctccagcaagttcgagtgccaactcaacaacctcaacgcgttggaacccgaccaccgcgttgagtccgaaggtggtcttattgaaacatggaactctcaacaccctgagctgcaatgcgccggtgtcactgtttccaaacgcaccctcaaccgcaacggcctccacttgccatcttactcaccttatccccaaatgatcattgtcgttcaaggtgcgtaatattagtaagagtatttatcagcttaacgtgataacaatatagtaatatgaaatatttattaaatttttataattaatctctgctagaaaatttgattaatcattttagtagaatttgtttttctcaactaggtttttaaacacca

SEQ ID NO: 5041 - DNA, 661 bp, Artificial; identical to SEQ ID NO: 4985
  Mutations within GlyA3B4 introduced by GmGlyA3B4_T03TALE nuclease

SEQ ID NO: 5042 - DNA, 650 bp, Artificial
  Mutations within GlyA3B4 introduced by GmGlyA3B4_T03TALE nuclease
gttcatgtacggttgcagatataaacgaagcatagcttatgtatgaggtgtaacaaaattggaaacaatagccatgcaaggtgaagaatgtcaccaactcagaaacccttcttcattgacgtgtccctcactcactctcctctcttcactataaatcgccactcttcgtgttctccacttcaccaactccttcaaacttattaacactttccttagttcaatatggggaagcccttcttcactctctctctttcttccctttgcttgctactcttgtcgagtgcatgctttgctattacctccagcaagtagtgccaactcaacaacctcaacgcgttggaacccgaccaccgcgttgagtccgaaggtggtcttattgaaacatggaactctcaacaccctgagctgcaatgcgccggtgtcactgtttccaaacgcaccctcaaccgcaacggcctccacttgccatcttactcaccttatccccaaatgatcattgtcgttcaaggtgcgtaatattagtaagaagtatttatcagcttaacgtgataacaataatagtaatatgaaatatttattaaatttttataattaatctctgctagaaaatttgattaatcattttagtagaatttgttttctcaactagg

SEQ ID NO: 5043 - DNA, 646 bp, Artificial
  Mutations within GlyA3B4 introduced by GmGlyA3B4_T03TALE nuclease
gttcatgtacggttgcagatataaacgaagcatagcttatgtatgaggtgtaacaaaattggaaacaatagccatgcaaggtgaagaatgtcaccaactcagaaacccttcttcattgacgtgtccctcactcactctcctctcttcactataaatcgccactcttcgtgttctccacttcaccaactccttcaaacttattaacactttccttagttcaatatggggaagcccttcttcactctctctctttcttccctttgcttgctactcttgtcgagtgcatgctttgctattacctccagcaagtgccaactcaacaacctcaacgcgttggaacccgaccaccgcgttgagtccgaaggtggtcttattgaaacatggaactctcaacaccctgagctgcaatgcgccggtgtcactgtttccaaacgcaccctcaaccgcaacggcctccacttgccatcttactcaccttatccccaaatgatcattgtcgttcaaggtgcgtaatattagtaagaagtatttatcagcttaacgtgataacaatatagtaatatgaaatatttattaaatttttataattaatctctgctagaaaatttgattaatcattttagtagaatttgttttctcaactagg

SEQ ID NO: 5044 - DNA, 644 bp, Artificial; identical to SEQ ID NO: 4836
  Mutations within GlyA3B4 introduced by GmGlyA3B4_T03TALE nuclease

SEQ ID NO: 5045 - DNA, 498 bp, Artificial
  Mutations within GlyA3B4 introduced by GmGlyA3B4_T03TALE nuclease
gttcatgtacggttgcagatataaacgaagcatagcttatgtatgaggtgtaacaaaattggaaacaatagccatgcaaggtgaagaatgtcaccaactcagaaacccttcttcattgacgtgtccctcactcactctcctctctgccaactcaacaacctcaacgcgttggaacccgaccaccgcgttgagtccgaaggtggtcttattgaaacatggaactctcaacaccctgagctgcaatgcgccggtgtcactgtttccaaacgcaccctcaaccgcaacggcctccacttgccatcttactcaccttatccccaaatgatcattgtcgttcaaggtgcgtaatattagtaagaagtatttatcagcttaacgtgataacaataatagtaatatgaaatatttattaaattttttataattaatctctgctagaaaatttgattaatcatttttagtagaatttgtttttctcaactaggttttaaacaccac

SEQ ID NO: 5046 - DNA, 661 bp, Artificial
  Mutations within GlyA3B4 introduced by GmGlyA3B4_T03TALE nuclease
gttcatgtacggttgcagatataaacgaagcatagcttatgtatgaggtgtaacaaaattggaaacaatagccatgcaaggtgaagaatgtcaccaactcagaaacccttcttcattgacgtgtccctcactcactctcctctcttcactataaatcgccactcttcgtgttctccacttcaccaactccttcaaacttattaacactttccttagttcaatatggggaagcccttcttcactctctctctttcttccctttgcttgctactcttgtcgagtgcatgctttgctattacctccagcaagttgccaactcaacaacctcaacgcgttggaacccgaccaccgcgttgagtccgaaggtggtcttattgaaacatggaactctcaacaccctgagctgcaatgcgccggtgtcactgtttccaaacgcaccctcaaccgcaacggcctccacttgccatcttactcaccttatccccaaatgatcattgtcgttcaaggtgcgtaatattagtaagaagtatttatcagcttaacgtgataacaataatagtaatatgaaatatttattaaatttttataattaatctctgctagaaaatttgattaatcattttagtagaatttgttttctcaactaggttttaaaacacca

SEQ ID NO: 5047 - DNA, 536 bp, Artificial
  Mutations within GlyA3B4 introduced by GmGlyA3B4_T03TALE nuclease
gttcatgtacggttgcagatataaacgaagcatagcttatgtatgaggtgtaacaaaattggaaacaatagccatgcaaggtgaagaatgtcaccaactcagaaacccttcttcattgacgtgtccctcactcactctcctctcttcactataaatcgccactcttcgtgttctccacttcaccaactccttcaaacttattaacactttccttagttcaatatggggaagcccttcttcactctctctctttcttccctttgcttgctactcttgtcgagtgcatgctttgctattacctccagcaagttgagtccgaaggtggtcttattgaaacatggaactctcaacaccctgagctgcaatgcgccggtgtcactgtttccaaacgcacctcaaccgcaacggcctcactgccatcttactcaccttatcccaaatgatcattgtcgttcaggtgcgtcaatattagtcaagaagtattatcagcttaacgtgatacaataatagtaatatgaatatttattaatttttat

SEQ ID NO: 5048 - DNA, 563 bp, Artificial
  Mutations within GlyA3B4 introduced by GmGlyA3B4_T03TALE nuclease
gttcatgtacggttgcagatataaacgaagcatagcttatgtatgaggtgtaacaaaattggaaacaatagccatgcaaggtgaagaatgtcaccaactcagaaacccttcttcattgacgtgtccctcactcactctcctctcttcactataaatcgccactcttcgtgttctccacttcaccaactccttcaaacttattaacactttccttagttcaatatggggaagcccttcttcactctctctctttcttccctttgcttgctactcttattgagagagagtccgaaggtggtcttattgaaacatggaactctcaacaccctgagctgcaatgcgccggtgtcactgtttccaaacgcaccctcaaccgcaacggcctccacttgccatcttactcaccttatccccaaatgatcattgtcgttcaaggtgcgtaatattagtaagaagtatttatcagcttaacgtgataacaataatagtaatatgaaatatttattaaatttttttataattaatctctgctagaaaattttgattaatcatttttagtagaa

SEQ ID NO: 5049 - DNA, 648 bp, Artificial
  Mutations within GlyA3B4 introduced by GmGlyA3B4_T03TALE nuclease
gttcatgtacggttgcagatataaacgaagcatagcttatgtatgaggtgtaacaaaattggaaacaatagccatgcaaggtgaagaatgtcaccaactcagaaacccttcttcattgacgtgtccctcactcactctcctctcttcactataaatcgccactcttcgtgttctccacttcaccaactccttcaaacttattaacactttccttagttcaatatggggaagcccttcttcactctctctctttcttccctttgcttgctactcttgtcgagtgcatgctttgctattacctccagcaagttcaacgcgttggaacccgaccaccgcgttgagtccgaaggtggtcttattgaaacatggaactctcaacacctgagctgcaatgcgccggtgtcactgtttccaacgcaccctcaaccgcaacggcctccacttgccatcttactcaccttatccccaaatgatcattgtcgttcaaggtgcgtaatattagtaagaagtatttatcagcttaacgtgataacaataatagtaatatgaaatatttattaaattttttataattaatctctgctagaaaatttgattaatcatttttagtagaatttgttttttctcaactaggttttaaacaccaca

SEQ ID NO: 5050 - DNA, 661 bp, Artificial; identical to SEQ ID NO: 4985
  Mutations within GlyA3B4 introduced by GmGlyA3B4_T03TALE nuclease

SEQ ID NO: 5051 - DNA, 647 bp, Artificial; identical to SEQ ID NO: 4991
  Mutations within GlyA3B4 introduced by GmGlyA3B4_T03TALE nuclease

SEQ ID NO: 5052 - DNA, 567 bp, Artificial
  Mutations within GlyA3B4 introduced by GmGlyA3B4_T03TALE nuclease
gttcatgtacggttgcagatataaacgaagcatagcttatgtatgaggtgtaacaaaattggaaacaatagccatgcaaggtgaagaatgtcaccaactcagaaacccttcttcattgacgtgtccctcactcactctcctctcttcactataaatcgccactcttcgtgttctccacttcaccaactccttcaaacttattaacactttccttagttcaatatggggaagcccttcttcactctctctctttcttccctttgcttgctactcttgccaactcaacaacctcaacgcgttggaaccgaccaccgcgttgagtccgaaggtggtcttattgaaacatggaactctcaacaccctgagctgcaatgcgccggtgtcactgtttccaaacgcaccctcaaccgcaacggcctccacttgccatcttactcaccttatccccaaatgatcattgtcgttcaaggtgcgtcaatattagtaagaagtatttatcagcttaacgtgataacaaataatagtaatatgaaatatttattaatttttataattaatctctgctag

SEQ ID NO: 5053 - DNA, 665 bp, Artificial; identical to SEQ ID NO: 4933
  Mutations within GlyA3B4 introduced by GmGlyA3B4_T03TALE nuclease
  misc_feature (532): n is a or c or t or g

SEQ ID NO: 5054 - DNA, 556 bp, Artificial
  Mutations within GlyA3B4 introduced by GmGlyA3B4_T03TALE nuclease
gttcatgtacggttgcagatataaacgaagcatagcttatgtatgaggtgtaacaaaattggaaacaatagccatgcaaggtgaagaatgtcaccaactcagaaacccttcttcattgacgtgtccctcactcactctcctctcttcactataaatcgccactcttcgtgttctccacttcaccaactccttcaaacttattaacactttccttagttcaatatggggaagcccttcttcactctctctctttcttccctttgcttgctactcttgtcgagtgcatgctttgctattacctccagcaagttgagtccgaaggtggtcttattgaaacatggaactctcaacaccctgagctgcaatgcgccggtgtcactgtttccaaacgcaccctcaaccgcaacggcctccacttgccatcttactcaccttatccccaaatgatcattgtcgttcaaggtgcgtaatattagtaagaagtatttatcagcttaacgtgatacaataatagtaatatgaatatttattaatttttataattaatctctgctag

SEQ ID NO: 5055 - DNA, 645 bp, Artificial
  Mutations within GlyA3B4 introduced by GmGlyA3B4_T03TALE nuclease
gttcatgtacggttgcagatataaacgaagcatagcttatgtatgaggtgtaacaaaaattggaaacaatagccatgcaaggtgaagaatgtcaccaactcagaaacccttcttcattgacgtgtccctcactcactctcctctcttcactataaatcgccactcttcgtgttctccacttcaccaactccttcaaacttattaacactttccttagttcaatatggggaagcccttcttcactctctctctttcttccctttgcttgctactcttgtcgagtgcatgctttgctattacctccagcaagttgccaactcaacaacctcaacgcgttggaacccgaccaccgcgttgagtccgaaggtggtcttcattgaaacatggaactctcaacaccctgagctgcaatgcgccggtgtcactgtttccaaacgcaccctcaaccgcaacggcctccacttgccatcttactcaccttatccccaaatgatcattgtcgttcaaggtgcgtaatattagtaagaagtatttatcagcttaacgtgataacaatatagtaatatgaaatatttattaaatttttataattaatctctgctagaaaatttgattaatcattttagtagaatttgtttttctcaa

SEQ ID NO: 5056 - DNA, 650 bp, Artificial
  Mutations within GlyA3B4 introduced by GmGlyA3B4_T03TALE nuclease
gttcatgtacggttgcagatataaacgaagcatagcttatgtatgaggtgtaacaaaattggaaacaatagccatgcaaggtgaagaatgtcaccaactcagaaacccttcttcattgacgtgtccctcactcactctcctctcttcactataaatcgccactcttcgtgttctccacttcaccaactccttcaaacttattaacactttccttagttcaatatggggaagcccttcttcactctctctctttcttccctttgcttgctactcttgtcgagtgcatgctttgctattacctccagcaagttctgccaactcaacaacctcaacgcgttggaacccgaccaccgcgttgagtccgaaggtggtcttattgaaacatggaactctcaacaccctgagctgcaatgcgccggtgtcactgtttccaaacgcaccctcaaccgcaacggcctccacttgccatcttactcaccttatccccaaatgatcattgtcgttcaaggtgcgtaatattagtaagaagtatttatcagcttaacgtgataacaataatagtaatatgaaatatttattaaatttttataattaatctctgctagaaaatttgattaatcattttagtagaatttgttttctcaactagg

SEQ ID NO: 5057 - DNA, 616 bp, Artificial
  Mutations within GlyA3B4 introduced by GmGlyA3B4_T03TALE nuclease
gttcatgtacggttgcagatataaacgaagcatagcttatgtatgaggtgtaacaaaattggaaacaatagccatgcaaggtgaagaatgtcaccaactcagaaacccttcttcattgacgtgtccctcactcactctcctctcttcactataaatcgccactcttcgtgttctccacttcaccaactccttcaaacttattaacactttccttagttcaatatggggaagcccttcttcactctctctctttcttccctttgcttgctactcttgtcgagtgccaactcaacaacctcaacgcgttggaacccgaccaccgcgttgagtccgaaggtggtcttattgaaacatggaactctcaacaccctgagctgcaatgcgccggtgtcactgtttccaaacgcaccctcaaccgcaacggcctccacttgccatcttactcaccttatccccaaatgatcattgtcgttcaaggtgcgtaatattagtaagaagtatttatcagcttaacgtgataacaataatagtaatatgaaatatttattaatttttataattaatctctgctagaaatttgattaatcatttttagtagaatttgtttttctcaact

SEQ ID NO: 5058 - DNA, 616 bp, Artificial
  Mutations within GlyA3B4 introduced by GmGlyA3B4_T03TALE nuclease
gttcatgtacggttgcagatataaacgaagcatagcttatgtatgaggtgtaacaaaattggaaacaatagccatgcaaggtgaagaatgtcaccaactcagaaacccttcttcattgacgtgtccctcactcactctcctctcttcactataaatcgccactcttcgtgttctccacttcaccaactccttcaaacttattaacactttccttagttcaatatggggaagcccttcttcactctctctctttcttccctttgcttgctactcttgtcgagtgcatgctttgctattacctccagcaacaacctcaacgcgttggaacccgaccaccgcgttgagtccgaaggtggtcttattgaaacatggaactctcaacaccctgagctgcaatgcgccggtgtcactgtttccaaacgcacctcaaccgcaacggcctccacttgccatcttactcaccttatccccaaatgatcattgtcgttcaaggtgcgtaaatattagtaagaagtatttatcagcttaacgtgataacaataatagtaatatgaaatatttattaaattttttataattaatctctgctagaaaatttgattaatctttttagtag

SEQ ID NO: 5059 - DNA, 495 bp, Artificial
  Mutations within GlyA3B4 introduced by GmGlyA3B4_T03TALE nuclease
gttcatgtacggttgcagatataaacgaagcatagcttatgtatgaggtgtaacaaaattggaaacaatagccatgcaaggtgaagaatgtcaccaactcagaaacccttcttcattgacgtgtccctcactcactctcctctcttcactataaatcgccactcttcgtgttctccacttcaccaactccttcaaacttattaacactttccttagttcaatatggggaagcccttcttcactctctctctttcttccctttgcttgctactcttgtcgagtgcatgctttgctattacctccacttgccatcttactcaccttatccccaaatgatcattgtcgttcaaggtgcgtaatattagtaagaagtatttatcagcttaacgtgataacaataatagtaatatgaaatatttattaaatttttataattaatctctgctagaaaatttgattaatcatttttagtagaatttgtttttctcaactagg

SEQ ID NO: 5060 - DNA, 634 bp, Artificial
  Mutations within GlyA3B4 introduced by GmGlyA3B4_T03TALE nuclease
gttcatgtacggttgcagatataaacgaagcatagcttatgtatgaggtgtaacaaaattggaaacaatagccatgcaaggtgaagaatgtcaccaactcagaaacccttcttcattgacgtgtccctcactcactctcctctcttcactataaatcgccactcttcgtgttctccacttcaccaactccttcaaacttattaacactttccttagttcaatatggggaagcccttcttcactctctctctttcttccctttgcttgctactcttgtcgagtgcatgctttgctattacctccagcaagttcaacgttggaacccgaccaccgcgttgagtccgaaggtggtcttattgaaacatggaactctcaacaccctgagctgcaatgcgccggtgtcactgtttccaaacgcaccctcaaccgcaacggcctccacttgccatcttactcaccttatccccaaatgatcattgtcgttcaaggtgcgtaatattagtaagaagtatttatcagcttaacgtgataacaataatagtaatatgaaatatttattaaattttttataattaattctctgctagaaaatttgattaatcatttttagtagaatttgtttttctcaactagg

SEQ ID NO: 5061 - DNA, 646 bp, Artificial; identical to SEQ ID NO: 4861
  Mutations within GlyA3B4 introduced by GmGlyA3B4_T03TALE nuclease

SEQ ID NO: 5062 - DNA, 619 bp, Artificial
  Mutations within GlyA3B4 introduced by GmGlyA3B4_T03TALE nuclease
gttcatgtacggttgcagatataaacgaagcatagcttatgtatgaggtgtaacaaaattggaaacaatagccatgcaaggtgaagaatgtcaccaactcagaaacccttcttcattgacgtgtccctcactcactctcctctcttcactataaatcgccactcttcgtgttctccacttcaccaactccttcaaacttattaacactttccttagttcaatatggggaagcccttcttcactctctctctttcttccctttgcttgctactcttgtcgagtgccaactcaacaacctcaacgcgttggaacccgaccaccgcgttgagtccgaaggtggtcttattgaaacatggaactctcaacaccctgagctgcaatgcgccggtgtcactgtttccaaacgcaccctcaaccgcaacggcctccacttgccatcttactcaccttatccccaaatgatcattgtcgttcaaggtgcgtaatattagtaagaagtatttatcagcttaacgtgataacaataatagtaatatgaaatatttattaattttttataattaatctctgctagaaaatttgattaatcatttttagtagaatttgtttttctcaacta

SEQ ID NO: 5063 - DNA, 702 bp, Artificial
  Mutations within GlyA3B4 introduced by GmGlyA3B4_T03TALE nuclease
gttcatgtacggttgcagatataaacgaagcatagcttatgtatgaggtgtaacaaaattggaaacaatagccatgcaaggtgaagaatgtcaccaactcagaaacccttcttcattgacgtgtccctcactcactctcctctcttcactataaatcgccactcttcgtgttctccacttcaccaactccttcaaacttattaacactttccttagttcaatatggggaagcccttcttcactctctctctttcttccctttgcttgctactcttgtcgagtgcatgctttgctattacctccagcaatggcgatggccaccacctgctgggggtcaagccgtgggcctggcacagcaccggcaatgccaactcaacaacctcaacgcgttggaacccgaccaccgcgttgagtccgaaggtggtcttattgaaacatggaactctcaacaccctgagctgcaatgcgccggtgtcactgtttccaaacgcaccctcaaccgcaacggcctccacttgccatcttactcaccttatccccaaatgatcattgtcgttcaaggtgcgtaatattagtaagaagtatttatcagcttaacgtgataacaataatagtaatatgaaatatttattaaattttttataaattaatctctgctagaaaatttgaattaatcattttagtagaatttgtttttctcaa

SEQ ID NO: 5064 - DNA, 635 bp, Artificial
  Mutations within GlyA3B4 introduced by GmGlyA3B4_T03TALE nuclease
gttcatgtacggttgcagatataaacgaagcatagcttatgtatgaggtgtaacaaaattggaaacaatagccatgcaaggtgaagaatgtcaccaactcagaaacccttcttcattgacgtgtccctcactcactctcctctcttcactataaatcgccactcttcgtgttctccacttcaccaactccttcaaacttattaacactttccttagttcaatatggggaagcccttcttcactctctctctttcttccctttgcttgctactcttgtcgagtgcatgctttgctattacctccagcaagagtgccaactcaacaacctcaacgcgttggaacccgaccaccgcgttgagtccgaaggtggtcttattgaaacatggaactctcaacaccctgagctgcaatgcgccggtgtcactgtttccaaacgcaccctcaaccgcaacggcctccacttgccatcttactcaccttatccccaaatgatcattgtcgttcaaggtgcgtaatattagtaagaagtatttatcagcttaacgtgataacaataatagtaatatgaaatatttattaaatttttataattaatctctgctagaaaatttgattaatcattttagtagaatttg

SEQ ID NO: 5065 - DNA, 619 bp, Artificial
  Mutations within GlyA3B4 introduced by GmGlyA3B4_T03TALE nuclease
gttcatgtacggttgcagatataaacgaagcatagcttatgtatgaggtgtaacaaaattggaaacaatagccatgcaaggtgaagaatgtcaccaactcagaaacccttcttcattgacgtgtccctcactcactctcctctcttcactataaatcgccactcttcgtgttctccacttcaccaactccttcaaacttattaacactttccttagttcaatatggggaagcccttcttcactctctctctttcttccctttgctgagtgccaactcaacaacctcaacgcgttggaacccgaccaccgcgttgagtccgaaggtggtcttattgaaacatggaactctcaacaccctgagctgcaatgcgccggtgtcactgtttccaaacgcaccctcaaccgcaacggcctccacttgccgtcttactcaccttatccccaaatgatcattgtcgttcaaggtgcgtaatattagtaagaagtatttatcagcttaacgtgataacaataatagtaatatgaaatatttattaattttttataattaatctctgctagaaaatttgattaatcatttttagtagaatttgtttttctcaactaggtttttaaaaca

SEQ ID NO: 5066 - DNA, 526 bp, Artificial
  Mutations within GlyA3B4 introduced by GmGlyA3B4_T03TALE nuclease
gttcatgtacggttgcagatataaacgaagcatagcttatgtatgaggtgtaacaaaattggaaacaatagccatgcaaggtgaagaatgtcaccaactcagaaacccttcttcattgacgtgtccctcactcactctcctctcttcactataaatcgccactcttcgtgttctccacttcaccaactccttcaaacttattaacactttccttagttcaataagaccaccgcgttgagtccgaaggtggtcttattgaaacatggaactctcaacaccctgagctgcaatgcgccggtgtcactgtttccaaacgcaccctcaaccgcaacggcctccacttgccatcttactcaccttatccccaaatgatcattgtcgttcaaggtgcgtaatattagtaagaagtatttatcagcttaacgtgataacaataatagtaatatgaaatatttattaaattttttataattaatctctgctagaaaatttgattaatcatttttagtagaatttgttttttctc

SEQ ID NO: 5067 - DNA, 619 bp, Artificial
  Mutations within GlyA3B4 introduced by GmGlyA3B4_T03TALE nuclease
gttcatgtacggttgcagatataaacgaagcatagcttatgtatgaggtgtaacaaaattggaaacaatagccatgcaaggtgaagaatgtcaccaactcagaaacccttcttcattgacgtgtccctcactcactctcctctcttcactataaatcgccactcttcgtgttctccacttcaccaactccttcaaacttattaacactttccttagttcaatatggggaagcccttcttcactctctctctttcttccctttgcttgctactcttgtcgagtgccaactcaacaacctcaacgcgttggaacccgaccaccgcgttgagtcccgaaggtggtcttattgaaacatggaactctcaacaccctgagctgcaatgcgccggtgtcactgtttccaaacgcaccctcaaccgcaacggcctccacttgccatcttactcaccttatccccaaatgatcattgtcgttcaaggtgcgtaatattagtaagaagtatttatcagcttaacgtgataacaataatagtaatatgaaatatttattaattttttataattaatctctgctagaaaatttgattaatcatttttagtagaatttgtttttctcaact

SEQ ID NO: 5068 - DNA, 583 bp, Artificial
  Mutations within GlyA3B4 introduced by GmGlyA3B4_T03TALE nuclease
gttcatgtacggttgcagatataaacgaagcatagcttatgtatgaggtgtaacaaaattggaaacaatagccatgcaaggtgaagaatgtcaccaactcagaaacccttcttcattgacgtgtccctcactcactctcctctcttcactataaatcgccactcttcgtgttctccacttcaccaactccttcaaacttattaacactttccttagttcaatatggggaagcccttcttcactcaacgcggtggtcaacaacctcaacgcgttggaacccgaccaccgcgttgagtccgaaggtggtcttattgaaacatggaactctcaacaccctgagctgcaatgcgccggtgtcactgtttccaaacgcaccctcaaccgcaacggcctccacttgccatcttactcaccttatccccaaatgatcattgtcgttcaaggtgcgtaatattagtaagaagtatttatcagcttaacgtgataacaataatagtaatatgaaatatttattaaattttttataattaatctctgctagaaaatttgattaatcatttttagtagaatttgtttttctcaa

SEQ ID NO: 5069 - DNA, 656 bp, Artificial
  Mutations within GlyA3B4 introduced by GmGlyA3B4_T03TALE nuclease
gttcatgtacggttgcagatataaacgaagcatagcttatgtatgaggtgtaacaaaattggaaacaatagccatgcaaggtgaagaatgtcaccaactcagaaacccttcttcattgacgtgtccctcactcactctcctctcttcactataaatcgccactcttcgtgttctccacttcaccaactccttcaaacttattaacactttccttagttcaatatggggaagcccttcttcactctctctctttcttccctttgcttgctactcttgtcgagtgcatgctttgctattacctccagcaagttcagtgccaactcaacaacctcaacgcgttggaacccgaccaccgcgttgagtccgaaggtggtcttattgaaacatggaactctcaacaccctgagctgcaatgcgccggtgtcactgtttccaaacgcaccctcaaccgcaacggcctccacttgccatcttactcaccttatccccaaatgatcattgtcgttcaaggtgcgtaatattagtaagaagtatttatcagcttaacgtgataacaatatagtaatatgaaatatttattaaatttttataatttaatctctgctagaaaatttgattaatcattttagtagaatttgttttctcaactaggtttt

SEQ ID NO: 5070 - DNA, 640 bp, Artificial
  Mutations within GlyA3B4 introduced by GmGlyA3B4_T03TALE nuclease
gttcatgtacggttgcagatataaacgaagcatagcttatgtatgaggtgtaacaaaattggaaacaatagccatgcaaggtgaagaatgtcaccaactcagaaacccttcttcattgacgtgtccctcactcactctcctctcttcactataaatcgccactcttcgtgttctccacttcaccaactccttcaaacttattaacactttccttagttcaatatggggaagcccttcttcactctctctctttcttccctttgcttgctactcttgtcgagtgcatgctttgctattacctccagcaagccaactcaacaacctcaacgcgttggaacccgaccaccgcgttgagtccgaaggtggtcttattgaaacatggaactctcaacaccctgagctgcaatgcgccggtgtcactgtttccaaacgcaccctcaaccgcaacggcctccacttgccatcttactcaccttatccccaaatgatcattgtcgttcaaggtgcgtaatattagtaagaagtatttatcagcttaacgtgataacaataatagtaatatgaaatatttattaaatttttataattaatctctgctagaaaatttgattaatcattttagtagaatttgttttctcaa

SEQ ID NO: 5071 - DNA, 645 bp, Artificial
  Mutations within GlyA3B4 introduced by GmGlyA3B4_T03TALE nuclease
gttcatgtacggttgcagatataaacgaagcatagcttatgtatgaggtgtaacaaaattggaaacaatagccatgcaaggtgaagaatgtcaccaactcagaaacccttcttcattgacgtgtccctcactcactctcctctcttcactataaatcgccactcttcgtgttctccacttcaccaactccttcaaacttattaacactttccttagttcaatatggggaagcccttcttcactctctctctttcttccctttgcttgctactcttgtcgagtgcatgctttgctattacctccagcaagttcattggaacccgaccaccgcgttgagtccgaaggtggtcttattgaaacatggaactctcaacaccctgagctgcaatgcgccggtgtcactgtttccaaacgcaccctcaaccgcaacggcctccacttgccatcttactcaccttatccccaaatgatcattgtcgttcaaggtgcgtaatattagtaagaagtatttatcagcttaacgtgataacaataatagtaatatgaaatatttattaaattttttataattaatctctgctagaaaatttgattaatcatttttagtagaatttgttttttctcaactaggttttaaacaccaca

SEQ ID NO: 5072 - DNA, 540 bp, Artificial
  Mutations within GlyA3B4 introduced by GmGlyA3B4_T03TALE nuclease
gttcatgtacggttgcagatataaacgaagcatagcttatgtatgaggtgtaacaaaattggaaacaatagccatgcaaggtgaagaatgtcaccaactcagaaacccttcttcattgacgtgtccctcactcactctcctctcttcactataaatcgccactcttcgtgttctccacttcacctcactttcgatcgatgaccacccttcaacaacctcaacgcgttggaacccgaccaccgcgttgagtccgaaggtggtcttattgaaacatggaactctcaacaccctgagctgcaatgcgccggtgtcactgtttccaaacgcaccctcaaccgcaacggcctccacttgccatcttactcaccttatcccccaaatgatcattgtcgttcaaggtgcgtaatattagtaagaagtatttatcagcttaacgtgataacaataatagtaatatgaaatatttattaaattttttataattaatctctgctagaaaattgattaatcatttttagtagaattgttttttctcaacta

SEQ ID NO: 5073 - DNA, 626 bp, Artificial
  Mutations within GlyA3B4 introduced by GmGlyA3B4_T03TALE nuclease
gttcatgtacggttgcagatataaacgaagcatagcttatgtatgaggtgtaacaaaattggaaacaatagccatgcaaggtgaagaatgtcaccaactcagaaacccttcttcattgacgtgtccctcactcactctcctctcttcactataaatcgccactcttcgtgttctccacttcaccaactccttcaaacttattaacactttccttagttcaatatggggaagcccttcttcactctctctctttcttccctttgcttgctactcttgtcgagtgcatgctttgctattacctcaacgcgttggaacccgaccaccgcgttgagtccgaaggtggtcttattgaaacatggaactctcaacaccctgagctgcaatgcgccggtgtcactgtttccaaacgcaccctcaaccgcaacggcctccacttgccatcttactcaccttatccccaaatgatcattgtcgttcaaggtgcgtaatattagtaagaagtatttatcagcttaacgtgataacaataatagtaatatgaaatatttattaaattttttataattaatctctgctagaaaatttgattaatcatttttagtagaatttgttttttctcaactagg

SEQ ID NO: 5074 - DNA, 660 bp, Artificial
  Mutations within GlyA3B4 introduced by GmGlyA3B4_T03TALE nuclease
gttcatgtacggttgcagatataaacgaagcatagcttatgtatgaggtgtaacaaaattggaaacaatagccatgcaaggtgaagaatgtcaccaactcagaaacccttcttcattgacgtgtccctcactcactctcctctcttcactataaatcgccactcttcgtgttctccacttcaccaactccttcaaacttattaacactttccttagttcaatatggggaagcccttcttcactctctctctttcttccctttgcttgctactcttgtcgagtgcatgctttgctattacctccagcaagttgccaactcaacaacctcaacgcgttggaacccgaccaccgcgttgagtccgaaggtggtcttattgaaacatggaactctcaacaccctgagctgcaatgcgccggtgtcactgtttccaaacgcaccctcaaccgcaacggcctccacttgccatcttactcaccttatccccaaatgatcattgtcgttcaaggtgcgtaatattagtaagaagtatttatcagcttaacgtgataacaatatagtaatatgaaatatttattaaatttttataattaatctctgctagaaaatttgattaatcattttagtagaatttgttttctcaactaggttttaaaacacca

SEQ ID NO: 5075 - DNA, 622 bp, Artificial
  Mutations within GlyA3B4 introduced by GmGlyA3B4_T03TALE nuclease
gttcatgtacggttgcagatataaacgaagcatagcttatgtatgaggtgtaacaaaattggaaacaatagccatgcaaggtgaagaatgtcaccaactcagaaacccttcttcattgacgtgtccctcactcactctcctctcttcactataaatcgccactcttcgtgttctccacttcaccaactccttcaaacttattaacactttccttagttcaatatggggaagcccttcttcactctctctctttcttccctttgcttgctactcttgtcgagtgcatgctttgctattacctccagcaagttgagtgccaactcaacaacctcaacgcgttggaacccgaccaccgcgttgagtccgaaggtggtcttattgaaacatggaactctcaacaccctgagctgcaatgcgccggtgtcactgtttccaaacgcaccctcaaccgcaacggcctccacttgccatcttactcaccttatccccaaatgatcattgtcgttcaaggtgcgtaatattagtaagaagtatttatcagcttaacgtgataacaatatagtaatatgaaatatttattaaatttttataattaatctctgctagaaaatttgattaatca

SEQ ID NO: 5076 - DNA, 508 bp, Artificial
  Mutations within GlyA3B4 introduced by GmGlyA3B4_T03TALE nuclease
gttcatgtacggttgcagatataaacgaagcatagcttatgtatgaggtgtaacaaaattggaaacaatagccatgcaaggtgaagaatgtcaccaactcagaaacccttcttcattgacgtgtccctcactcactctcctctcttcactataaatcgccactcttcgtgttctccacttcaccaactccttcaaacttattaacactttccttagttcaatatggggaagcccttcttcactctctctctttcttccctttgcttgctactcttgtcgagtgcatgctttgctattacctccacttgccatcttactcaccttatccccaaatgatcattgtcgttcaaggtgcgtaatattagtaagaagtatttatcagcttaacgtgataacaataatagtaatatgaaatatttattaaattttttataattaatctctgctagaaaatttgattaatcatttttagtagaatttgtttttctcaactaggttttaaacacca

SEQ ID NO: 5077 - DNA, 695 bp, Artificial
  Mutations within GlyA3B4 introduced by GmGlyA3B4_T03TALE nuclease
gttcatgtacggttgcagatataaacgaagcatagcttatgtatgaggtgtaacaaaattggaaacaatagccatgcaaggtgaagaatgtcaccaactcagaaacccttcttcattgacgtgtccctcactcactctcctctcttcactataaatcgccactcttcgtgttctccacttcaccaactccttcaaacttattaacactttccttagttcaatatggggaagcccttcttcactctctctctttcaagccgtgggcctggcacagcaccggcaacagccgctggaccgtctccagcgcctgcttgccaccgccattgctggcgatggccaccgagtgccaactcaacaacctcaacgcgttggaaccccgaccaccgcgttgagtccgaaggtggtcttattgaaacatggactctcaacaccctgagctgcaatgcgccggtgtcactgtttccaaacgcaccctcaaccgcaacggcctccacttgccatcttactcaccttatccccaaatgatcattgtcgttcaaggtgcgtaatattagtaagaagtatttatcagcttaacgtgataacaataatagtaatatgaaatatttattaaattttttataattaatctctgctagaaaatttgattaatcatttttatgtagaatttgttttttctcaactaggttttaaaa

SEQ ID NO: 5078 - DNA, 658 bp, Artificial
  Mutations within GlyA3B4 introduced by GmGlyA3B4_T03TALE nuclease
gttcatgtacggttgcagatataaacgaagcatagcttatgtatgaggtgtaacaaaattggaaacaatagccatgcaaggtgaagaatgtcaccaactcagaaacccttcttcattgacgtgtccctcactcactctcctctcttcactataaatcgccactcttcgtgttctccacttcaccaactccttcaaacttattaacactttccttagttcaatatggggaagcccttcttcactctctctctttcttccctttgcttgctactcttgtcgagtgcatgctttgctattacctccagcaagccaactcaacaacctcaacgcgttggaacccgaccaccgcgttgagtccgaaggtggtcttattgaaacatggaactctcaacaccctgagctgcaatgcgccggtgtcactgtttccaaacgcaccctcaaccgcaacggcctccacttgccatcttactcaccttatccccaaatgatcattgtcgttcaaggtgcgtaatattagtaagaagtatttatcagcttaacgtgataacaatatagtaatatgaaatatttattaaatttttataattaatctctgctagaaaatttgattaatcattttagtagaatttgttttctcaactaggtttttaaaacacca

SEQ ID NO: 5079 - DNA, 633 bp, Artificial
  Mutations within GlyA3B4 introduced by GmGlyA3B4_T03TALE nuclease
gttcatgtacggttgcagatataaacgaagcatagcttatgtatgaggtgtaacaaaattggaaacaatagccatgcaaggtgaagaatgtcaccaactcagaaacccttcttcattgacgtgtccctcactcactctcctctcttcactataaatcgccactcttcgtgttctccacttcaccaactccttcaaacttattaacactttccttagttcaatatggggaagcccttcttcactctctctctttcttccctttgcttgctactcttgtcgagtgcatgctttgctattacctccagcaagttgccaactcaacaacctcaacgcgttggaacccgaccaccgcgttgagtccgaaggtggtcttattgaaacatggaactctcaacaccctgagctgcaatgcgccggtgtcactgtttccaaacgcaccctcaaccgcaacggcctccacttgccatcttactcaccttatccccaaatgatcattgtcgttcaaggtgcgtaatattagtaagaagtatttatcagcttaacgtgataacaatatagtaatatgaaatatttattaaatttttataattaatctctgctagaaaatttgattaatcattttagtagaatttg

SEQ ID NO: 5080 - DNA, 573 bp, Artificial
  Mutations within GlyA3B4 introduced by GmGlyA3B4_T03TALE nuclease
gttcatgtacggttgcagatataaacgaagcatagcttatgtatgaggtgtaacaaaattggaaacaatagccatgcaaggtgaagaatgtcaccaactcagaaacccttcttcattgacgtgtccctcactcactctcctctcttcactataaatcgccactcttcgtgttctccacttcaccaactccttcaaacttattaacactttccttagttcaatatggggaagcccttcttcactctctctctttcttcccgaccaccgcgttgagtccgaaggtggtcttattgaaacatggaactctcaacacctgagctgcaatgcgccggtgtcactgtttccaaacgcaccctcaaccgcaacggcctccacttgccatcttactcaccttatccccaaatgatcattgtcgttcaaggtgcgtaatattagtaagaagtatttatcagcttaacgtgataacaataatagtaatatgaaatatttattaaattttttataattaatctctgctagaaatttgattaatcattttagtagaatttgtttttctcaactaggttttaaaca

SEQ ID NO: 5081 - DNA, 658 bp, Artificial
  Mutations within GlyA3B4 introduced by GmGlyA3B4_T03TALE nuclease
gttcatgtacggttgcagatataaacgaagcatagcttatgtatgaggtgtaacaaaattggaaacaatagccatgcaaggtgaagaatgtcaccaactcagaaacccttcttcattgacgtgtccctcactcactctcctctcttcactataaatcgccactcttcgtgttctccacttcaccaactccttcaaacttattaacactttccttagttcaatatggggaagcccttcttcactctctctctttcttccctttgcttgctactcttgtcgagtgcatgctttgctattacctccagcaagtagtgccaactcaacaacctcaacgcgttggaacccgaccaccgcgttgagtccgaaggtggtcttattgaaacatggaactctcaacaccctgagctgcaatgcgccggtgtcactgtttccaaacgcaccctcaaccgcaacggcctccacttgccatcttactcaccttatccccaaatgatcattgtcgttcaaggtgcgtaatattagtaagaagtatttatcagcttaacgtgataacaataatagtaatatgaaatatttattaaatttttataattaatctctgctagaaaatttgattaatcattttagtagaatttgttttctcaactaggttttaaaa

SEQ ID NO: 5082 - DNA, 665 bp, Artificial; identical to SEQ ID NO: 4918
  Mutations within GlyA3B4 introduced by GmGlyA3B4_T03TALE nuclease

SEQ ID NO: 5083 - DNA, 646 bp, Artificial; identical to SEQ ID NO: 4907
  Mutations within GlyA3B4 introduced by GmGlyA3B4_T03TALE nuclease

SEQ ID NO: 5084 - DNA, 584 bp, Artificial
  Mutations within GlyA3B4 introduced by GmGlyA3B4_T03TALE nuclease
gttcatgtacggttgcagatataaacgaagcatagcttatgtatgaggtgtaacaaaattggaaacaatagccatgcaaggtgaagaatgtcaccaactcagaaacccttcttcattgacgtgtccctcactcactctcctctcttcactataaatcgccactcttcgtgttctccacttcaccaactccttcaaacttattaacactttccttagttcaatatggggaagcccttcttcaccaactcaacaacctcaacgcgttggaacccgaccaccgcgttgagtccgaaggtggtcttattgaaacatggaactctcaacaccctgagctgcaatgcgccggtgtcactgtttccaaacgcaccctcaaccgcaacggcctccacttgccatcttactcaccttatccccaaaatgatcattgtcgttcaaggtgcgtaatattagtaagaagtatttatcagcttaacgtgataacaataaatagtaatatgaaatatttattaaattttttataattaatctctgctagaaatttgattaatcattttagtagaatttgtttttctcaactaggtttt

SEQ ID NO: 5085 - DNA, 495 bp, Artificial
  Mutations within GlyA3B4 introduced by GmGlyA3B4_T03TALE nuclease
gttcatgtacggttgcagatataaacgaagcatagcttatgtatgaggtgtaacaaaattggaaacaatagccatgcaaggtgaagaatgtcaccaactcagaaacccttcttcattgacgtgtccctcactcactctcctctcttcactataaatcgccactcttcgtgttctccacttcaccaactccgaaggtggtcttattgaaacatggaactctcaacaccctgagctgcaatgcgccggtgtcactgtttccaaacgcaccctcaaccgcaacggcctccacttgccatcttactcaccttatccccaaatgatcattgtcgttcaaggtgcgtaatattagtaagaagtatttatcagcttaacgtgataacaataatagtaatatgaaatattttattaaattttttataattaatctctgctagaaaatttgattaatcatttttagtagaatttgtttttctcaactaggttttaaacaccaca

SEQ ID NO: 5086 - DNA, 649 bp, Artificial; identical to SEQ ID NO: 4913
  Mutations within GlyA3B4 introduced by GmGlyA3B4_T03TALE nuclease

SEQ ID NO: 5087 - DNA, 649 bp, Artificial
  Mutations within GlyA3B4 introduced by GmGlyA3B4_T03TALE nuclease
gttcatgtacggttgcagatataaacgaagcatagcttatgtatgaggtgtaacaaaattggaaacaatagccatgcaaggtgaagaatgtcaccaactcagaaacccttcttcattgacgtgtccctcactcactctcctctcttcactataaatcgccactcttcgtgttctccacttcaccaactccttcaaacttattaacactttccttagttcaatatggggaagcccttcttcactctctctctttcttccctttgcttgctactcttgtcgagtgcatgctttgctattacctccagcaagttcaacgcgttggaacccgaccaccgcgttgagtccgaaggtggtcttattgaaacatggaactctcaacaccctgagctgcaatgcgccggtgtcactgtttccaaacgcacctcaaccgcaacggcctccacttgccatcttactcaccttatccccaaatgatcattgtcgttcaaggtgcgtaatattagtaagaagtatttatcagcttaacgtgataacaataatagtaatatgaaatatttattaaattttttataattaatctctgctagaaaatttgattaatcatttttagtagaatttgttttttctcaactaggttttaaacaccaca

SEQ ID NO: 5088 - DNA, 665 bp, Artificial; identical to SEQ ID NO: 4810
  Mutations within GlyA3B4 introduced by GmGlyA3B4_T03TALE nuclease

SEQ ID NO: 5089 - DNA, 638 bp, Artificial
  Mutations within GlyA3B4 introduced by GmGlyA3B4_T03TALE nuclease
gttcatgtacggttgcagatataaacgaagcatagcttatgtatgaggtgtaacaaaattggaaacaatagccatgcaaggtgaagaatgtcaccaactcagaaacccttcttcattgacgtgtccctcactcactctcctctcttcactataaatcgccactcttcgtgttctccacttcaccaactccttcaaacttattaacactttccttagttcaatatggggaagcccttcttcactctctctctttcttccctttgcttgctactcttgtcgagtgcatgctttgctattacctccagcaagttgagtgccaactcaacaacctcaacgcgttggaacccgaccaccgcgttgagtccgaaggtggtcttattgaaacatggaactctcaacaccctgagctgcaatgcgccggtgtcactgtttccaaacgcaccctcaaccgcaacggcctccacttgccatcttactcaccttatccccaaatgatcattgtcgttcaaggtgcgtaatattagtaagaagtatttatcagcttaacgtgataacaataatagtaatatgaaatatttattaaatttttataattaatctctgctagaaaatttgattaatcattttagtagaatttg

SEQ ID NO: 5090 - DNA, 647 bp, Artificial
  Mutations within GlyA3B4 introduced by GmGlyA3B4_T03TALE nuclease
gttcatgtacggttgcagatataaacgaagcatagcttatgtatgaggtgtaacaaaattggaaacaatagccatgcaaggtgaagaatgtcaccaactcagaaacccttcttcattgacgtgtccctcactcactctcctctcttcactataaatcgccactcttcgtgttctccacttcaccaactccttcaaacttattaacactttccttagttcaatatggggaagcccttcttcactctctctctttcttccctttgcttgctactcttgtcgagtgcatgctttgctattacctccagcaagtgagtgccaactcaacaacctcaacgcgttggaacccgaccaccgcgttgagtccgaaggtggtcttattgaaacatggaactctcaacaccctgagctgcaatgcgccggtgtcactgtttccaaacgcaccctcaaccgcaacggcctccacttgccatcttactcaccttatccccaaatgatcattgtcgttcaaggtgcgtaatattagtaagaagtatttatcagcttaacgtgataacaataatagtaatatgaaatatttattaaatttttataattaatctctgctagaaaatttgattaatcattttagtagaatttgttttctcaac

SEQ ID NO: 5091 - DNA, 646 bp, Artificial
  Mutations within GlyA3B4 introduced by GmGlyA3B4_T03TALE nuclease
gttcatgtacggttgcagatataaacgaagcatagcttatgtatgaggtgtaacaaaattggaaacaatagccatgcaaggtgaagaatgtcaccaactcagaaacccttcttcattgacgtgtccctcactcactctcctctcttcactataaatcgccactcttcgtgttctccacttcaccaactccttcaaacttattaacactttccttagttcaatatggggaagcccttcttcactctctctctttcttccctttgcttgctactcttgtcgagtgcatgctttgctattacctccagcaagttctgccaactcaacaacctcaacgcgttggaacccgaccaccgcgttgagtccgaaggtggtcttattgaaacatggaactctcaacaccctgagctgcaatgcgccggtgtcactgtttccaaacgcaccctcaaccgcaacggcctccacttgccatcttactcaccttatccccaaatgatcattgtcgttcaaggtgcgtaatattagtaagaagtatttatcagcttaacgtgataacaataatagtaatatgaaatatttattaaatttttataattaatctctgctagaaaatttgattaatcattttagtagaatttgttttctcaac

SEQ ID NO: 5092 - DNA, 660 bp, Artificial; identical to SEQ ID NO: 4874
  Mutations within GlyA3B4 introduced by GmGlyA3B4_T03TALE nuclease

SEQ ID NO: 5093 - DNA, 640 bp, Artificial; identical to SEQ ID NO: 5018
  Mutations within GlyA3B4 introduced by GmGlyA3B4_T03TALE nuclease

SEQ ID NO: 5094 - DNA, 561 bp, Artificial
  Mutations within GlyA3B4 introduced by GmGlyA3B4_T03TALE nuclease
gttcatgtacggttgcagatataaacgaagcatagcttatgtatgaggtgtaacaaaattggaaacaatagccatgcaaggtgaagaatgtcaccaactcagaaacccttcttcattgacgtgtccctcactcactctcctctcttcactataaatcgccactcttcgtgttctccacttcaccaactccttcaaacttattaacactttccttagttcaatatggggaagcccttcttcactctctctctttcttccctttgcttgctactcttgtcgaaacatggaactctcaacaccctgagctgcaatgcgccggtgtcactgtttccaaacgcaccctcaaccgcaacggcctccacttgccatcttactcaccttatccccaaatgatcattgtcgttcaaggtgcgtaatattagtaagaagtatttatcagcttaacgtgataacaataatagtaatatgaaatatttattaaattttttataattaatctctgctagaaaatttgattaatcattttagtagaatttgtttttctcaactaggttttaaaca

SEQ ID NO: 5095 - DNA, 496 bp, Artificial
  Mutations within GlyA3B4 introduced by GmGlyA3B4_T03TALE nuclease
gttcatgtacggttgcagatataaacgaagcatagcttatgtatgaggtgtaacaaaattggaaacaatagccatgcaaggtgaagaatgtcaccaactcagaaacccttcttcattgacgtgtccctcactcactctcctctcttcactataaatcgccactcttcgtgttctccacttcaccaactccttcaaacttattaacactttccttagttcaatatggggaagcccttcttcactctctcccttattgaaacatggaactctcaacaccctgagctgcaatgcgccggtgtcactgtttccaaacgcaccctcaaccgcaacggcctccacttgccatcttactcaccttatccccaaatgatcattgtcgttcaaggtgcgtaatattagtaagaagtatttatcagcttaacgtgataacaataatagtaatatgaaatatttattaaattttttataattaatctctgctagaaaatttgattaa

SEQ ID NO: 5096 - DNA, 569 bp, Artificial
  Mutations within GlyA3B4 introduced by GmGlyA3B4_T03TALE nuclease
gttcatgtacggttgcagatataaacgaagcatagcttatgtatgaggtgtaacaaaattggaaacaatagccatgcaaggtgaagaatgtcaccaactcagaaacccttcttcattgacgtgtccctcactcactctcctctcttcactataaatcgccactcttcgtgttctccacttcaccaactccttcaaacttattaacactttccttagttcaatatggggaagcccttcttcactctctctctttcttccctttgcttgctactcttgagtccgaaggtggtcttattgaaacatggaactctcaacaccctgagctgcaatgcgccggtgtcactgtttccaaacgcaccctcaaccgcaacggcctccacttgccatcttactcaccttatccccaaaatgatcattgtcgttcaaggtgcgtaatattagtaagaagtatttatcagcttaacgtgataacaataatagtaatatgaatatttattaaattttttatattaatctctgctagaaaatttgattaatcattttagtagaatttgtttttctcaactagg

SEQ ID NO: 5097 - DNA, 648 bp, Artificial; identical to SEQ ID NO: 4974
  Mutations within GlyA3B4 introduced by GmGlyA3B4_T03TALE nuclease

SEQ ID NO: 5098 - DNA, 538 bp, Artificial
  Mutations within GlyA3B4 introduced by GmGlyA3B4_T03TALE nuclease
gttcatgtacggttgcagatataaacgaagcatagcttatgtatgaggtgtaacaaaattggaaacaatagccatgcaaggtgaagaatgtcaccaactcagaaacccttcttcattgacgtgtccctcactcactctcctctcttcactataaatcgccactcttcgtgttctccacttcaccaactccttcaaacttattaacactttccttagttcaatatggggaagcccttcttcactctctctctttcttccctttgcttgctactcttgtcgagtgcatgctttgagtccgaaggtggtcttattgaaacatggaactctcaacaccctgagctgcaatgcgccggtgtcactgtttccaaacgcaccctcaaccgcaacggcctccacttgccatcttactcaccttatccccaaatgatcattgtcgttcaaggtgcgtaatattagtaagaagtatttatcagcttaacgtgataacaataatagtaatatgaaatatttattaaatttttataattaatctctgcta

SEQ ID NO: 5099 - DNA, 522 bp, Artificial; identical to SEQ ID NO: 2321
  Mutations within GlyA3B4 introduced by GmGlyA3B4_T03TALE nuclease

SEQ ID NO: 5100 - DNA, 628 bp, Artificial
  Mutations within GlyA3B4 introduced by GmGlyA3B4_T03TALE nuclease
gttcatgtacggttgcagatataaacgaagcatagcttatgtatgaggtgtaacaaaattggaaacaatagccatgcaaggtgaagaatgtcaccaactcagaaacccttcttcattgacgtgtccctcactcactctcctctcttcactataaatcgccactcttcgtgttctccacttcaccaactccttcaaacttattaacactttccttagttcaatatggggaagcccttcttcactctctctctttcttccctttgcttgctactcttgtcgagtgcatgctttgctattacctccagcccaactcaacaacctcaacgcgttggaacccgaccaccgcgttgagtccgaaggtggtcttattgaaacatggaactctcaacaccctgagctgcaatgcgccggtgtcactgtttccaaacgcaccctcaaccgcaacggcctccacttgccatcttactcaccttatccccaaatgatcattgtcgttcaaggtgcgtaatattagtaagaagtatttatcagcttaacgtgataacaataatagtaatatgaaatatttattaaatttttataattaatctctgctagaaaatttgattaatcattttagtagaatttg

SEQ ID NO: 5101 - DNA, 664 bp, Artificial
  Mutations within GlyA3B4 introduced by GmGlyA3B4_T03TALE nuclease
gttcatgtacggttgcagatataaacgaagcatagcttatgtatgaggtgtaacaaaattggaaacaatagccatgcaaggtgaagaatgtcaccaactcagaaacccttcttcattgacgtgtccctcactcactctcctctcttcactataaatcgccactcttcgtgttctccacttcaccaactccttcaaacttattaacactttccttagttcaatatggggaagcccttcttcactctctctctttcttccctttgcttgctactcttgtcgagtgcatgctttgctattacctccagcaagttagtgccaactcaacaacctcaacgcgttggaacccgaccaccgcgttgagtccgaaggtggtcttattgaaacatggaactctcaacaccctgagctgcaatgcgccggtgtcactgtttccaaacgcaccctcaaccgcaacggcctccacttgccatcttactcaccttatccccaaatgatcattgtcgttcaaggtgcgtaatattagtaagtagtatttatcagcttaacgtgataacaataatagtaatatgaaatatttattaaatttttataattaatctctgctagaaaatttgattaatcattttagtagaatttgttttctcaactaggttttaaaacacca

SEQ ID NO: 5102 - DNA, 588 bp, Artificial
  Mutations within GlyA3B4 introduced by GmGlyA3B4_T03TALE nuclease
gttcatgtacggttgcagatataaacgaagcatagcttatgtatgaggtgtaacaaaattggaaacaatagccatgcaaggtgaagaatgtcaccaactcagaaacccttcttcattgacgtgtccctcactcactctcctctcttcactataaatcgccactcttcgtgttctccacttcaccaactccttcaaacttattaacacttcaccaactccttcaaacttattaacacttcggactcaacgcggtgaaaaaaattggaacccgaccaccgcgttgagtccgaaggtggtcttattgaaacatggaactctcaacaccctgagctgcaatgcgccggtgtcactgtttccaaacgcaccctcaaccgcaacggcctccacttgccatcttactcaccttatccccaaaatgatcattgtcgttcaaggtgcgtaatattagtaagaagtatttatcagcttaacgtgataacaataaatagttaatatgaaatatttattaaattttttatattaatctctgctagaaaatttgattaatcattttagtagaatttgtttttctcaactaggttttaaaca

SEQ ID NO: 5103 - DNA, 647 bp, Artificial
  Mutations within GlyA3B4 introduced by GmGlyA3B4_T03TALE nuclease
gttcatgtacggttgcagatataaacgaagcatagcttatgtatgaggtgtaacaaaattggaaacaatagccatgcaaggtgaagaatgtcaccaactcagaaacccttcttcattgacgtgtccctcactcactctcctctcttcactataaatcgccactcttcgtgttctccacttcaccaactccttcaaacttattaacactttccttagttcaatatggggaagcccttcttcactctctctctttcttccctttgcttgctactcttgtcgagtgcatgctttgctattacctccagcaagttgagtgccaactcaacaacctcaacgcgttggaacccgaccaccgcgttgagtccgaaggtggtcttattgaaacatggaactctcaacaccctgagctgcaatgcgccggtgtcactgtttccaaacgcaccctcaaccgcaacggcctccacttgccatcttactcaccttatccccaaatgatcattgtcgttcaaggtgcgtaatattagtaagaagtatttatcagcttaacgtgataacaataatagtaatatgaaatatttattaaatttttataattaatctctgctagaaaatttgattaatcattttagtagaatttgttttctcaa

SEQ ID NO: 5104 - DNA, 636 bp, Artificial
  Mutations within GlyA3B4 introduced by GmGlyA3B4_T03TALE nuclease
gttcatgtacggttgcagatataaacgaagcatagcttatgtatgaggtgtaacaaaattggaaacaatagccatgcaaggtgaagaatgtcaccaactcagaaacccttcttcattgacgtgtccctcactcactctcctctcttcactataaatcgccactcttcgtgttctccacttcaccaactccttcaaacttattaacactttccttagttcaatatggggaagcccttcttcactctctctctttcttccctttgcttgctactcttgtcgagtgcatgctttgctattacctccagcaagtagtgccaactcaacaacctcaacgcgttggaacccgaccaccgcgttgagtccgaaggtggtcttattgaaacatggaactctcaacaccctgagctgcaatgcgccggtgtcactgtttccaaacgcaccctcaaccgcaacggcctccacttgccatcttactcaccttatccccaaatgatcattgtcgttcaaggtgcgtaatattagtaagaagtatttatcagcttaacgtgataacaataatagtaatatgaaatatttattaaatttttataattaatctctgctagaaaatttgattaatcattttagtagaatttg

SEQ ID NO: 5105 - DNA, 652 bp, Artificial
  Mutations within GlyA3B4 introduced by GmGlyA3B4_T03TALE nuclease
gttcatgtacggttgcagatataaacgaagcatagcttatgtatgaggtgtaacaaaattggaaacaatagccatgcaaggtgaagaatgtcaccaactcagaaacccttcttcattgacgtgtccctcactcactctcctctcttcactataaatcgccactcttcgtgttctccacttcaccaactccttcaaacttattaacactttccttagttcaatatggggaagcccttcttcactctctctctttcttccctttgcttgctactcttgtcgagtgcatgctttgctattacctccagcaagagtgccaactcaacaacctcaacgcgttggaacccgaccaccgcgttgagtccgaaggtggtcttattgaaacatggaactctcaacaccctgagctgcaatgcgccggtgtcactgtttccaaacgcaccctcaaccgcaacggcctccacttgccatcttactcaccttatccccaaatgatcattgtcgttcaaggtgcgtaatattagtaagaagtatttatcagcttaacgtgataacaatatagtaatatgaaatatttattaaatttttataattaatctctgctagaaaatttgattaatcattttagtagaatttgttttctcaactaggtttt

SEQ ID NO: 5106 - DNA, 655 bp, Artificial
  Mutations within GlyA3B4 introduced by GmGlyA3B4_T03TALE nuclease
gttcatgtacggttgcagatataaacgaagcatagcttatgtatgaggtgtaacaaaaattggaaacaatagccatgcaaggtgaagaatgtcaccaactcagaaacccttcttcattgacgtgtccctcactcactctcctctcttcactataaatcgccactcttcgtgttctccacttcaccaactccttcaaacttattaacactttccttagttcaatatggggaagcccttcttcactctctctctttcttccctttgcttgctactcttgtcgagtgcatgctttgctattacctccagcaagtagtgccaactcaacaacctcaacgcgttggaacccgaccaccgcgttgagtccgaaggtggtcttattgaaacatggaactctcaacaccctgagctgcaatgcgccggtgtcactgtttccaaacgcaccctcaaccgcaacggcctccacttgccatcttactcaccttatccccaaatgatcattgtcgttcaaggtgcgtaatattagtaagaagtatttatcagcttaacgtgataacaataatagtaatatgaaatatttattaaatttttataattaatctctgctagaaaatttgattaatcattttagtagaatttgttttctcaactaggtttt

SEQ ID NO: 5107 - DNA, 499 bp, Artificial; identical to SEQ ID NO: 4856
  Mutations within GlyA3B4 introduced by GmGlyA3B4_T03TALE nuclease

SEQ ID NO: 5108 - DNA, 494 bp, Artificial
  Mutations within GlyA3B4 introduced by GmGlyA3B4_T03TALE nuclease
gttcatgtacggttgcagatataaacgaagcatagcttatgtatgaggtgtaacaaaattggaaacaatagccatgcaaggtgaagaatgtcaccaactcagaaacccttcttcattgacgtgtccctcactcactctcctctcttcaacgagtgccaactcaacaacctcaacgcgttggaacccgaccaccgcgttgagtccgaaggtggtcttattgaaacatggaactctcaacaccctgagctgcaatgcgccggtgtcactgtttccaaacgcaccctcaaccgcaacggcctccacttgccatcttactcaccttatccccaaatgatcattgtcgttcaaggtgcgtaatattagtaagaagtatttatcagcttaacgtgataacaataatagtaatatgaaatatttattaaattttttataattaatctctgctagaaaatttgattaatcatttttagtagaatttgtttttctcaactagg

SEQ ID NO: 5109 - DNA, 659 bp, Artificial
  Mutations within GlyA3B4 introduced by GmGlyA3B4_T03TALE nuclease
gttcatgtacggttgcagatataaacgaagcatagcttatgtatgaggtgtaacaaaattggaaacaatagccatgcaaggtgaagaatgtcaccaactcagaaacccttcttcattgacgtgtccctcactcactctcctctcttcactataaatcgccactcttcgtgttctccacttcaccaactccttcaaacttattaacactttccttagttcaatatggggaagcccttcttcactctctctctttcttccctttgcttgctactcttgtcgagtgcatgctttgctattacctccagcaagtgccaactcaacaacctcaacgcgttggaacccgaccaccgcgttgagtccgaaggtggtcttattgaaacatggaactctcaacaccctgagctgcaatgcgccggtgtcactgtttccaaacgcaccctcaaccgcaacggcctccacttgccatcttactcaccttatccccaaatgatcattgtcgttcaaggtgcgtaatattagtaagaagtatttatcagcttaacgtgataacaatatagtaatatgaaatatttattaaatttttataattaatctctgctagaaaatttgattaatcattttagtagaatttgttttctcaactaggttttaaaacacca

SEQ ID NO: 5110 - DNA, 480 bp, Artificial; identical to SEQ ID NO: 4790
  Mutations within GlyA3B4 introduced by GmGlyA3B4_T03TALE nuclease

SEQ ID NO: 5111 - DNA, 632 bp, Artificial
  Mutations within GlyA3B4 introduced by GmGlyA3B4_T03TALE nuclease
  misc_feature (532): n is a or c or t or g
gttcatgtacggttgcagatataaacgaagcatagcttatgtatgaggtgtaacaaaattggaaacaatagccatgcaaggtgaagaatgtcaccaactcagaaacccttcttcattgacgtgtccctcactcactctcctctcttcactataaatcgccactcttcgtgttctccacttcaccaactccttcaaacttattaacactttccttagttcaatatggggaagcccttcttcactctctctctttcttccctttgcttgctactcttgtcgagtgcatgctttgctattacctccagcaagttcgagtgccaactcaacaacctcaacgcgttggaacccgaccaccgcgttgagtccgaaggtggtcttattgaaacatggaactctcaacaccctgagctgcaatgcgccggtgtcactgtttccaaacgcaccctcaaccgcaacggcctccacttgccatcttactcaccttatccccaaatgatcattgtcgttcaaggtgcgtaatattagtaagagnatttatcagcttaacgtgatacaatatagtaatatgaaatatttattaaatttttataattaatctctgctagaaaatttgattaatcattttagtagaa

SEQ ID NO: 5112 - DNA, 646 bp, Artificial
  Mutations within GlyA3B4 introduced by GmGlyA3B4_T03TALE nuclease
gttcatgtacggttgcagatataaacgaagcatagcttatgtatgaggtgtaacaaaattggaaacaatagccatgcaaggtgaagaatgtcaccaactcagaaacccttcttcattgacgtgtccctcactcactctcctctcttcactataaatcgccactcttcgtgttctccacttcaccaactccttcaaacttattaacactttccttagttcaatatggggaagcccttcttcactctctctctttcttccctttgcttgctactcttgtcgagtgcatgcttcaccaactcaacaacctcaacgcgttggaacccgaccaccgcgttgagtccgaaggtggtcttattgaaacatggaactctcaacaccctgagctgcaatgcgccggtgtcactgtttccaaacgcaccctcaaccgcaacggcctccacttgccatcttactcaccttatccccaaatgatcattgtcgttcaaggtgcgtaatattagtaagaagtatttatcagcttaacgtgataacaataatagtaatatgaaatatttattaaattttttataattaatctctgctagaaaatttgattaatcatttttagtagaatttgttttttctcaactaggttttaaacaccaca

SEQ ID NO: 5113 - DNA, 664 bp, Artificial; identical to SEQ ID NO: 4996
  Mutations within GlyA3B4 introduced by GmGlyA3B4_T03TALE nuclease

SEQ ID NO: 5114 - DNA, 665 bp, Artificial; identical to SEQ ID NO: 4918
  Mutations within GlyA3B4 introduced by GmGlyA3B4_T03TALE nuclease

SEQ ID NO: 5115 - DNA, 656 bp, Artificial
  Mutations within GlyA3B4 introduced by GmGlyA3B4_T03TALE nuclease
gttcatgtacggttgcagatataaacgaagcatagcttatgtatgaggtgtaacaaaattggaaacaatagccatgcaaggtgaagaatgtcaccaactcagaaacccttcttcattgacgtgtccctcactcactctcctctcttcactataaatcgccactcttcgtgttctccacttcaccaactccttcaaacttattaacactttccttagttcaatatggggaagcccttcttcactctctctctttcttccctttgcttgctactcttgtcgagtgcatgctttgctattacctccagcaagttcaagtgccaactcaacaacctcaacgcgttggaacccgaccaccgcgttgagtccgaaggtggtcttattgaaacatggaactctcaacaccctgagctgcaatgcgccggtgtcactgtttccaaacgcaccctcaaccgcaacggcctccacttgccatcttactcaccttatccccaaatgatcattgtcgttcaaggtgcgtaatattagtaagaagtatttatcagcttaacgtgataacaatatagtaatatgaaatatttattaaatttttataattaatctctgctagaaaatttgattaatcattttagtagaatttgttttctcaactaggtttt

SEQ ID NO: 5116 - DNA, 648 bp, Artificial
  Mutations within GlyA3B4 introduced by GmGlyA3B4_T03TALE nuclease
gttcatgtacggttgcagatataaacgaagcatagcttatgtatgaggtgtaacaaaattggaaacaatagccatgcaaggtgaagaatgtcaccaactcagaaacccttcttcattgacgtgtccctcactcactctcctctcttcactataaatcgccactcttcgtgttctccacttcaccaactccttcaaacttattaacactttccttagttcaatatggggaagcccttcttcactctctctctttcttccctttgcttgctactcttgtcgagtgcatgctttgctattacctccagcaagttgccaactcaacaacctcaacgcgttggaacccgaccaccgcgttgagtccgaaggtggtcttattgaaacatggaactctcaacaccctgagctgcaatgcgccggtgtcactgtttccaaacgcaccctcaccgcaacggcctccacttgccatcttactcaccttatcccaactgaatcattgtcgttcaaggtgcgtaatattagtaagaagtatttatcagcttaacgtgataacaataatagtaatatgaaatatttattaaatttttataattaatctctgctagaaaatttgattaatcattttagtagaatttgtttttctcaactagg

SEQ ID NO: 5117 - DNA, 557 bp, Artificial
  Mutations within GlyA3B4 introduced by GmGlyA3B4_T03TALE nuclease
gttcatgtacggttgcagatataaacgaagcatagcttatgtatgaggtgtaacaaaattggaaacaatagccatgcaaggtgaagaatgtcaccaactcagaaacccttcttcattgacgtgtccctcactcactctcctctcttcactataaatcgccactcttcgtgttctccacttcaccaactccttcaaacttattaacactttccttagttcaatatggggaagcccttcttcactctctctctttcttccctttgcttgctactcttgtcgagtgcatgctttgctattacctccacgcgttgagtccgaaggtggtcttattgaaacatggaactctcaacaccctgagctgcaatgcgccggtgtcactgtttccaaacgcaccctcaaccgcaacggcctccacttgccatcttactcaccttatccccaaatgatcattgtcgttcaaggtgcgtaatattagtaagaagtatttatcagcttaacgtgataacaataatagtaatatgaaatatttattaatttttataattaatctctgctag

SEQ ID NO: 5118 - DNA, 620 bp, Artificial
  Mutations within GlyA3B4 introduced by GmGlyA3B4_T03TALE nuclease
gttcatgtacggttgcagatataaacgaagcatagcttatgtatgaggtgtaacaaaattggaaacaatagccatgcaaggtgaagaatgtcaccaactcagaaacccttcttcattgacgtgtccctcactcactctcctctcttcactataaatcgccactcttcgtgttctccacttcaccaactccttcaaacttattaacactttccttagttcaatatggggaagcccttcttcactctctctctttcttccctttgcttgctactcttgtcgagtgcatgctttgctattacctccagcaaaacaacctcaacgcgttggaacccgaccaccgcgttgagtccgaaggtggtcttattgaaacatggaactctcaacaccctgagctgcaatgcgccggtgtcactgtttccaaacgcaccctcaaccgcaacggcctccacttgccatcttactcaccttatccccaaatgatcattgtcgttcaaggtgcgtaatattagtaagaagtatttatcagcttaacgtgataacaataatagtaatatgaaatatttattaaattttttataattaatctctgctagaaaatttgattaatctttttagtagaa

SEQ ID NO: 5119 - DNA, 638 bp, Artificial
  Mutations within GlyA3B4 introduced by GmGlyA3B4_T03TALE nuclease
gttcatgtacggttgcagatataaacgaagcatagcttatgtatgaggtgtaacaaaattggaaacaatagccatgcaaggtgaagaatgtcaccaactcagaaacccttcttcattgacgtgtccctcactcactctcctctcttcactataaatcgccactcttcgtgttctccacttcaccaactccttcaaacttattaacactttccttagttcaatatggggaagcccttcttcactctctctctttcttccctttgcttgctactcttgtcgagtgcatgctttgctattacctccagcaagttcagtgccaactcaacaacctcaacgcgttggaacccgaccaccgcgttgagtccgaaggtggtcttattgaaacatggaactctcaacaccctgagctgcaatgcgccggtgtcactgtttccaaacgcaccctcaaccgcaacggcctccacttgccatcttactcaccttatccccaaatgatcattgtcgttcaaggtgcgtaatattagtaagaagtatttatcagcttaacgtgataacaataatagtaatatgaaatatttattaaatttttataattaatctctgctagaaaatttgattaatcattttagtagaatttg

SEQ ID NO: 5120 - DNA, 414 bp, Artificial
  Mutations within GlyA3B4 introduced by GmGlyA3B4_T03TALE nuclease
gttcatgtacggttgcagatataaacgaagcatagcttatgtatgaggtgtaacaaaattggaaacaatagccatgcaaggtgaagaatgtcaccaactcaacaacctcaacgcgttggaaccccgaccaccgcgttgagtccgaaggtggtcttattgaaacatggaactctcaacaccctgagctgcaatgcgccggtgtcactgtttccaaacgcaccctcaaccgcaacggcctccacttgccatcttactcaccttatccccaaatgatcattgtcgttcaaggtgcgtaatattagtaagaagtatttatcagcttaacgtgataacaataatagtaatatgaaatatttattaaattttttataattaatctctgctagaaaatttgattaatcatttttagtagaa

SEQ ID NO: 5121 - DNA, 618 bp, Artificial; identical to SEQ ID NO: 2963
  Mutations within GlyA3B4 introduced by GmGlyA3B4_T03TALE nuclease

SEQ ID NO: 5122 - DNA, 621 bp, Artificial
  Mutations within GlyA3B4 introduced by GmGlyA3B4_T03TALE nuclease
gttcatgtacggttgcagatataaacgaagcatagcttatgtatgaggtgtaacaaaattggaaacaatagccatgcaaggtgaagaatgtcaccaactcagaaacccttcttcattgacgtgtccctcactcactctcctctcttcactataaatcgccactcttcgtgttctccacttcaccaactccttcaaacttattaacactttccttagttcaatatggggaagcccttcttcactctctctctttcttccctttgcttgctactcttgtcgagtgccaactcaacaacctcaacgcgttggaacccgaccaccgcgttgagtcccgaaggtggtcttattgaaacatggaactctcaacaccctgagctgcaatgcgccggtgtcactgtttccaaacgcaccctcaaccgcaacggcctccacttgccatcttactcaccttatccccaaatgatcattgtcgttcaaggtgcgtaatattagtaagaagtatttatcagcttaacgtgataacaataatagtaatatgaaatatttattaatttttataattaatctctgctagaaaatttgattaatcatttttagtagaatttgtttttctcaactagg

SEQ ID NO: 5123 - DNA, 664 bp, Artificial
  Mutations within GlyA3B4 introduced by GmGlyA3B4_T03TALE nuclease
gttcatgtacggttgcagatataaacgaagcatagcttatgtatgaggtgtaacaaaattggaaacaatagccatgcaaggtgaagaatgtcaccaactcagaaacccttcttcattgacgtgtccctcactcactctcctctcttcactataaatcgccactcttcgtgttctccacttcaccaactccttcaaacttattaacactttccttagttcaatatggggaagcccttcttcactctctctctttcttccctttgcttgctactcttgtcgagtgcatgctttgctattacctccagcaagtgagtgccaactcaacaacctcaacgcgttggaacccgaccaccgcgttgagtccgaaggtggtcttattgaaacatggaactctcaacaccctgagctgcaatgcgccggtgtcactgtttccaaacgcaccctcaaccgcaacggcctccacttgccatcttactcaccttatccccaaatgatcattgtcgttcaaggtgcgtaatattagtaagaagtatttatcagcttaacgtgataacaataatagtaatatgaaatatttattaaatttttataattaatctctgctagaaaatttgattaatcattttagtagaatttgttttctcaactaggttttaaaacacca

SEQ ID NO: 5124 - DNA, 494 bp, Artificial; identical to SEQ ID NO: 4880
  Mutations within GlyA3B4 introduced by GmGlyA3B4_T03TALE nuclease

SEQ ID NO: 5125 - DNA, 620 bp, Artificial; identical to SEQ ID NO: 3332
  Mutations within GlyA3B4 introduced by GmGlyA3B4_T03TALE nuclease

SEQ ID NO: 5126 - DNA, 646 bp, Artificial
  Mutations within GlyA3B4 introduced by GmGlyA3B4_T03TALE nuclease
gttcatgtacggttgcagatataaacgaagcatagcttatgtatgaggtgtaacaaaattggaaacaatagccatgcaaggtgaagaatgtcaccaactcagaaacccttcttcattgacgtgtccctcactcactctcctctcttcactataaatcgccactcttcgtgttctccacttcaccaactccttcaaacttattaacactttccttagttcaatatggggaagcccttcttcactctctctctttcttccctttgcttgctactcttgtcgagtgcatgctttgctattacctccagcaagttcagtgccaactcaacaacctcaacgcgttggaacccgaccaccgcgttgagtccgaaggtggtcttattgaaacatggaactctcaacaccctgagctgcaatgcgccggtgtcactgtttccaaacgcaccctcaaccgcaacggcctccacttgccatcttactcaccttatccccaaatgatcattgtcgttcaaggtgcgtaatattagtaagaagtatttatcagcttaacgtgataacaatatagtaatatgaaatatttattaaatttttataattaatctctgctagaaaatttgattaatcattttagtgaatttgttttctcaac

SEQ ID NO: 5127 - DNA, 645 bp, Artificial; identical to SEQ ID NO: 5013
  Mutations within GlyA3B4 introduced by GmGlyA3B4_T03TALE nuclease

SEQ ID NO: 5128 - DNA, 637 bp, Artificial; identical to SEQ ID NO: 5016
  Mutations within GlyA3B4 introduced by GmGlyA3B4_T03TALE nuclease

SEQ ID NO: 5129 - DNA, 656 bp, Artificial
  Mutations within GlyA3B4 introduced by GmGlyA3B4_T03TALE nuclease
gttcatgtacggttgcagatataaacgaagcatagcttatgtatgaggtgtaacaaaattggaaacaatagccatgcaaggtgaagaatgtcaccaactcagaaacccttcttcattgacgtgtccctcactcactctcctctcttcactataaatcgccactcttcgtgttctccacttcaccaactccttcaaacttattaacactttccttagttcaatatggggaagcccttcttcactctctctctttcttccctttgcttgctactcttgtcgagtgcatgctttgctattacctccagcaagtgccaactcaacaacctcaacgcgttggaacccgaccaccgcgttgagtccgaaggtggtcttattgaaacatggaactctcaacaccctgagctgcaatgcgccggtgtcactgtttccaaacgcaccctcaaccgcaacggcctccacttgccatcttactcaccttatccccaaatgatcattgtcgttcaaggtgcgtaatattagtaagaagtatttatcagcttaacgtgataacaataatagtaatatgaaatatttattaaatttttataattaatctctgctagaaaatttgattaatcattttagtagaatttgttttctcaactaggtttttaaaa

SEQ ID NO: 5130 - DNA, 639 bp, Artificial
  Mutations within GlyA3B4 introduced by GmGlyA3B4_T03TALE nuclease
gttcatgtacggttgcagatataaacgaagcatagcttatgtatgaggtgtaacaaaattggaaacaatagccatgcaaggtgaagaatgtcaccaactcagaaacccttcttcattgacgtgtccctcactcactctcctctcttcactataaatcgccactcttcgtgttctccacttcaccaactccttcaaacttattaacactttccttagttcaatatggggaagcccttcttcactctctctctttcttccctttgcttgctactcttgtcgagtgcatgctttgctattacctccagcaactcaacaacctcaacgcgttggaacccgaccaccgcgttgagtccgaaggtggtcttattgaaacatggaactctcaacaccctgagctgcaatgcgccggtgtcactgtttccaaacgcaccctcaaccgcaacggcctccacttgccatcttactcaccttatccccaaatgatcattgtcgttcaaggtgcgtaatattagtaagaagtatttatcagcttaacgtgataacaatatagtaatatgaaatatttattaaatttttataattaatctctgctagaaaatttgattaatcattttagtagaatttgttttctcaactagg

SEQ ID NO: 5131 - DNA, 534 bp, Artificial
  Mutations within GlyA3B4 introduced by GmGlyA3B4_T03TALE nuclease
gttcatgtacggttgcagatataaacgaagcatagcttatgtatgaggtgtaacaaaattggaaacaatagccatgcaaggtgaagaatgtcaccaactcagaaacccttcttcattgacgtgtccctcactcactctcctctcttcactataaatcgccactcttcgtgttctccacttcaccaactccttcaaacttattaacactttccttagttcaataatggaacccgaccaccgcgttgagtccgaaggtggtcttattgaaacatggaactctcaacaccctgagctgcaatgcgccggtgtcactgtttccaaacgcaccctcaaccgcaacggcctccacttgccatcttactcaccttatccccaaatgatcattgtcgttcaaggtgcgtaatattagtaagaagtatttatcagcttaacgtgataacaataatagtaatatgaaatatttattaaattttttataattaatctctgctagaaaatttgattaatcatttttagtagaatttgttttttctc

SEQ ID NO: 5132 - DNA, 520 bp, Artificial
  Mutations within GlyA3B4 introduced by GmGlyA3B4_T03TALE nuclease
gttcatgtacggttgcagatataaacgaagcatagcttatgtatgaggtgtaacaaaattggaaacaatagccatgcaaggtgaagaatgtcaccaactcagaaacccttcttcattgacgtgtccctcactcactctcctctcttcactataaatcgccactcttcgtgttctccacttcaccaactccttcaaacttattaacactttccttagttcaatatggggaagcccttcttcactctctctctttcttccctttgcttgctactcttgtcgagtgcatgctttgctattacctccagcaagttcgcctccacttgccatcttactcaccttatccccaaatgatcattgtcgttcaaggtgcgtaatattagtaagaagtatttatcagcttaacgtgataacaataatagtaatatgaaatatttattaaattttttataattaatctctgctagaaaatttgattaatcatttttagtagaatttgtttttctcaactaggttttaaaca

SEQ ID NO: 5133 - DNA, 658 bp, Artificial
  Mutations within GlyA3B4 introduced by GmGlyA3B4_T03TALE nuclease
gttcatgtacggttgcagatataaacgaagcatagcttatgtatgaggtgtaacaaaattggaaacaatagccatgcaaggtgaagaatgtcaccaactcagaaacccttcttcattgacgtgtccctcactcactctcctctcttcactataaatcgccactcttcgtgttctccacttcaccaactccttcaaacttattaacactttccttagttcaatatggggaagcccttcttcactctctctctttcttccctttgcttgctactcttgtcgagtgcatgctttgctattacctccagcaagccaactcaacaacctcaacgcgttggaacccgaccaccgcgttgagtccgaaggtggtcttattgaaacatggaactctcaacaccctgagctgcaatgcgccggtgtcactgtttccaaacgcaccctcaaccgcaacggcctccacttgccatcttactcaccttatccccaaatgatcattgtcgttcaaggtgcgtaatattagtaagaagtatttatcagcttaacgtgataacaataatagtaatatgaaatatttattaaatttttataattaatctctgctagaaaatttgattaatcattttagtagaatttgttttctcaactaggttttaaaacacca

SEQ ID NO: 5134 - DNA, 637 bp, Artificial
  Mutations within GlyA3B4 introduced by GmGlyA3B4_T03TALE nuclease
gttcatgtacggttgcagatataaacgaagcatagcttatgtatgaggtgtaacaaaattggaaacaatagccatgcaaggtgaagaatgtcaccaactcagaaacccttcttcattgacgtgtccctcactcactctcctctcttcactataaatcgccactcttcgtgttctccacttcaccaactccttcaaacttattaacactttccttagttcaatatggggaagcccttcttcactctctctctttcttccctttgcttgctactcttgtcgagtgcatgctttgctattacctccagcaagtaagtgccaactcaacaacctcaacgcgttggaacccgaccaccgcgttgagtccgaaggtggtcttattgaaacatggaactctcaacaccctgagctgcaatgcgccggtgtcactgtttccaaacgcaccctcaaccgcaacggcctccacttgccatcttactcaccttatccccaaatgatcattgtcgttcaaggtgcgtaatattagtaagaagtatttatcagcttaacgtgataacaataatagtaatatgaaatatttattaaatttttataattaatctctgctagaaaatttgattaatcattttagtagaatttg

SEQ ID NO: 5135 - DNA, 637 bp, Artificial; identical to SEQ ID NO: 5000
  Mutations within GlyA3B4 introduced by GmGlyA3B4_T03TALE nuclease
  misc_feature (532): n is a or c or t or g

SEQ ID NO: 5136 - DNA, 645 bp, Artificial; identical to SEQ ID NO: 4887
  Mutations within GlyA3B4 introduced by GmGlyA3B4_T03TALE nuclease

SEQ ID NO: 5137 - DNA, 633 bp, Artificial
  Mutations within GlyA3B4 introduced by GmGlyA3B4_T03TALE nuclease
gttcatgtacggttgcagatataaacgaagcatagcttatgtatgaggtgtaacaaaattggaaacaatagccatgcaaggtgaagaatgtcaccaactcagaaacccttcttcattgacgtgtccctcactcactctcctctcttcactataaatcgccactcttcgtgttctccacttcaccaactccttcaaacttattaacactttccttagttcaatatggggaagcccttcttcactctctctctttcttccctttgcttgctactcttgtcgagtgcatgctttgctattacctccagcaagttcaactcaacaacctcaacgcgttggaacccgaccaccgcgttgagtccgaaggtggtcttattgaaacatggaactctcaacaccctgagctgcaatgcgccggtgtcactgtttccaaacgcaccctcaaccgcaacggcctccacttgccatcttactcaccttatccccaaatgatcattgtcgttcaaggtgcgtaatattagtaagaagtatttatcagcttaacgtgataacaataatagtaatatgaaatatttattaaatttttataatttaatctctgctagaaaatttgattaatcattttagtagaatttg

SEQ ID NO: 5138 - DNA, 662 bp, Artificial; identical to SEQ ID NO: 4805
  Mutations within GlyA3B4 introduced by GmGlyA3B4_T03TALE nuclease

SEQ ID NO: 5139 - DNA, 638 bp, Artificial
  Mutations within GlyA3B4 introduced by GmGlyA3B4_T03TALE nuclease
gttcatgtacggttgcagatataaacgaagcatagcttatgtatgaggtgtaacaaaattggaaacaatagccatgcaaggtgaagaatgtcaccaactcagaaacccttcttcattgacgtgtccctcactcactctcctctcttcactataaatcgccactcttcgtgttctccacttcaccaactccttcaaacttattaacactttccttagttcaatatggggaagcccttcttcactctctctctttcttccctttgcttgctactcttgtcgagtgcatgctttgctattacctccagcaagttcgagtgccaactcaacaacctcaacgcgttggaacccgaccaccgcgttgagtccgaaggtggtcttattgaaacatggaactctcaacaccctgagctgcaatgcgccggtgtcactgtttccaaacgcaccctcaaccgcaacggcctccacttgccatcttactcaccttatccccaaatgatcattgtcgttcaaggtgcgtaatattagtaagagtatttatcagcttaacgtgataacaataatagtaatatgaaatatttattaaatttttataattaatctctgctagaaaatttgattaatcattttagtagaatttg

SEQ ID NO: 5140 - DNA, 437 bp, Artificial
  Mutations within GlyA3B4 introduced by GmGlyA3B4_T03TALE nuclease
gttcatgtacggttgcagatataaacgaagcatagcttatgtatgaggtgtaacaaaattggaaacaatagccatgcaaggtgaagaatgtcaccaactcagaaacccttcttcattgacgtgtccctcactcactctcctctcttcactataaatcgccactcttcgtgttctccacttcaccaactccttcaaacttattaacactttccttagttcaataatggaacccgaccaccgcgttgagtcccgaaggtggtcttattgaaacatggaactctcaacaccctgagctgcaatgcgccggtgtcactgtttccaaacgcaccctcaaccgcaacggcctccacttgccatcttactcaccttatccccaaatgatcattgtcgttcaaggtgcgtaatattagtaagaagtatttatcagcttaacgtga

SEQ ID NO: 5141 - DNA, 581 bp, Artificial
  Mutations within GlyA3B4 introduced by GmGlyA3B4_T03TALE nuclease
gttcatgtacggttgcagatataaacgaagcatagcttatgtatgaggtgtaacaaaattggaaacaatagccatgcaaggtgaagaatgtcaccaactcagaaacccttcttcattgacgtgtccctcactcactctcctctcttcactataaatcgccactcttcgtgttctccacttcaccaactccttcaaacttattaacactttccttagttcaatatggggaagcccttcttcactctctctctttcttccctttgcttgctactcttgtcgaccaccgcgttgagtccgaaggtggtcttattgaaacatggaactctcaacaccctgagctgcaatgcgccggtgtcactgtttccaaacgcaccctcaaccgcaacggcctccacttgccatcttactcaccttatccccaaatgatcattgtcgttcaaggtgcgtaatattagtaagaagtatttatcagcttaacgtgataacaataatagtaatatgaaatatttattaaattttttataattaatctctgctagaaaatttgattaatcatttttagtagaatttgtttttctcaa

SEQ ID NO: 5142 - DNA, 662 bp, Artificial
  Mutations within GlyA3B4 introduced by GmGlyA3B4_T03TALE nuclease
gttcatgtacggttgcagatataaacgaagcatagcttatgtatgaggtgtaacaaaattggaaacaatagccatgcaaggtgaagaatgtcaccaactcagaaacccttcttcattgacgtgtccctcactcactctcctctcttcactataaatcgccactcttcgtgttctccacttcaccaactccttcaaacttattaacactttccttagttcaatatggggaagcccttcttcactctctctctttcttccctttgcttgctactcttgtcgagtgcatgctttgctattacctccagcaagttgtgccaactcaacaacctcaacgcgttggaacccgaccaccgcgttgagtccgaaggtggtcttattgaaacatggaactctcaacaccctgagctgcaatgcgccggtgtcactgtttccaaacgcaccctcaaccgcaacggcctccacttgccatcttactcaccttatccccaaatgatcattgtcgttcaaggtgcgtaatattagtaagaagtatttatcagcttaacgtgataacaatatagtaatatgaaatatttattaaatttttataattaatctctgctagaaaatttgattaatcattttagtagaatttgttttctcaactaggttttaaaacacca

SEQ ID NO: 5143 - DNA, 645 bp, Artificial; identical to SEQ ID NO: 5013
  Mutations within GlyA3B4 introduced by GmGlyA3B4_T03TALE nuclease

SEQ ID NO: 5144 - DNA, 662 bp, Artificial; identical to SEQ ID NO: 4805
  Mutations within GlyA3B4 introduced by GmGlyA3B4_T03TALE nuclease

SEQ ID NO: 5145 - DNA, 618 bp, Artificial
  Mutations within GlyA3B4 introduced by GmGlyA3B4_T03TALE nuclease
gttcatgtacggttgcagatataaacgaagcatagcttatgtatgaggtgtaacaaaattggaaacaatagccatgcaaggtgaagaatgtcaccaactcagaaacccttcttcattgacgtgtccctcactcactctcctctcttcactataaatcgccactcttcgtgttctccacttcaccaactccttcaaacttattaacactttccttagttcaatatggggaagcccttcttcactctctctctttcttccctttgcttgctactcttgtcgagtgccaactcaacaacctcaacgcgttggaacccgaccaccgcgttgagtccgaaggtggtcttattgaaacatggaactctcaacaccctgagctgcaatgcgccggtgtcactgtttccaaacgcaccctcaaccgcaacggcctccacttgccatcttactcaccttatccccaaatgatcattgtcgttcaaggtgcgtaatattagtaagaagtatttatcagcttaacgtgataacaataatagtaatatgaaatatttattaaatttttataattaatctctgctagaaaatttgattaatcatttttagtagaatttgtttttctcaact

SEQ ID NO: 5146 - DNA, 641 bp, Artificial
  Mutations within GlyA3B4 introduced by GmGlyA3B4_T03TALE nuclease
gttcatgtacggttgcagatataaacgaagcatagcttatgtatgaggtgtaacaaaattggaaacaatagccatgcaaggtgaagaatgtcaccaactcagaaacccttcttcattgacgtgtccctcactcactctcctctcttcactataaatcgccactcttcgtgttctccacttcaccaactccttcaaacttattaacactttccttagttcaatatggggaagcccttcttcactctctctctttcttccctttgcttgctactcttgtcgagtgcatgctttgctattacctccagcaagttctcaacgcgttggaacccgaccaccgcgttgagtccgaaggtggtcttattgaaacatggaactctcaacacctgagctgcaatgcgccggtgtcactgtttccaaacgcaccctcaaccgcaacggcctccacttgccatcttactcaccttatccccaaatgatcattgtcgttcaaggtgcgtaatattagtaagaagtatttatcagcttaacgtgataacaataatagtaatatgaaatatttattaaattttttataattaatctctgctagaaaatttgattaatcatttttagtagaatttgttttttctcaactaggtttt

SEQ ID NO: 5147 - DNA, 783 bp, Artificial
  Mutations within GlyA3B4 introduced by GmGlyA3B4_T03TALE nuclease
gttcatgtacggttgcagatataaacgaagcatagcttatgtatgaggtgtaacaaaattggaaacaatagccatgcaaggtgaagaatgtcaccaactcagaaacccttcttcattgacgtgtccctcactcactctcctctcttcactataaatcgccactcttcgtgttctccacttcaccaactccttcaaacttattaacactttccttagttcaatatggggaagcccttcttcactctctctctttcttccctttgcttgctactcttgtcgagtgcatgctttgctattacctccagcaagttcaacgcaatgcactgacgggtgccccgctcaacttgaccccccagcaggtggtggccatcgccagcaatattggtggcaagcaggcgctggagacggtccagcggctgttgccggtgctgtgccaggcccacggcttgaccccccgagtgccaactcaacaacctcaacgcgttggaacccgaccaccgcgttgagtccgaaggtggtcttattgaaacatggaactctcaacaccctgagctgcaatgcgccggtgtcactgtttccaaaacgcaccctcaaccgcaacggcctccacttgccatcttactcaccttatccccaaatgatcattgtcgttcaaggtgcgtaatattagtaagaagtatttatcagcttaacgtgataacaataatagtaatatgaaaatatttattaaaattttttataattaatctcttgctagaaaatttgattaatcatttttagtag

SEQ ID NO: 5148 - DNA, 373 bp, Artificial
  Mutations within GlyA3B4 introduced by GmGlyA3B4_T03TALE nuclease
gttcatgtacggttgcagatataaacgaagcatagcttatgtatgaggtgtaacaaaattggaaacaatagccatgcaaggtgaagaatgtcaccaactcagaaacccttcttcattgacgtgtccctcactcactctcctctcttcactataaatcgccactcttcgtgttctccacttcaccaactccttcaaacttattaacactttccttagttcaatatggggaagcccttcttcactctctctctttcttccctttgcttgctactcttgtcgagtgcatgctttgctattacctccagcaagtcgtgcgtaatacttagtaagaagtcaatttattgcaagccttaacgtcgataactaataatca

SEQ ID NO: 5149 - DNA, 634 bp, Artificial
  Mutations within GlyA3B4 introduced by GmGlyA3B4_T03TALE nuclease
gttcatgtacggttgcagatataaacgaagcatagcttatgtatgaggtgtaacaaaattggaaacaatagccatgcaaggtgaagaatgtcaccaactcagaaacccttcttcattgacgtgtccctcactcactctcctctcttcactataaatcgccactcttcgtgttctccacttcaccaactccttcaaacttattaacactttccttagttcaatatggggaagcccttcttcactctctctctttcttccctttgcttgctactcttgtcgagtgcatgctttgctattacctccagcaaagtgccaactcaacaacctcaacgcgttggaacccgaccaccgcgttgagtccgaaggtggtcttattgaaacatggaactctcaacaccctgagctgcaatgcgccggtgtcactgtttccaaacgcaccctcaaccgcaacggcctccacttgccatcttactcaccttatccccaaatgatcattgtcgttcaaggtgcgtaatattagtaagaagtatttatcagcttaacgtgataacaataatagtaatatgaaatatttattaaatttttataattaatctctgctagaaaatttgattaatcattttagtagaatttg

SEQ ID NO: 5150 - DNA, 632 bp, Artificial
  Mutations within GlyA3B4 introduced by GmGlyA3B4_T03TALE nuclease
gttcatgtacggttgcagatataaacgaagcatagcttatgtatgaggtgtaacaaaattggaaacaatagccatgcaaggtgaagaatgtcaccaactcagaaacccttcttcattgacgtgtccctcactcactctcctctcttcactataaatcgccactcttcgtgttctccacttcaccaactccttcaaacttattaacactttccttagttcaatatggggaagcccttcttcactctctctctttcttccctttgcttgctactcttgtcgagtgccaactcaacaacctcaacgcgttggaacccgaccaccgcgttgagtccgaaggtggtcttattgaaacatggaactctcaacaccctgagctgcaatgcgccggtgtcactgtttccaaacgcaccctcaaccgcaacggcctccacttgccatcttactcaccttatccccaaatgatcattgtcgttcaaggtgcgtaatattagtaagaagtatttatcagcttaacgtgataacaataatagtaatatgaaatatttattaattttttataatttaatctctgctagaaaatttgattaatcatttttagtagaatttgtttttctcaactaggtttttaaaca

SEQ ID NO: 5151 - DNA, 638 bp, Artificial; identical to SEQ ID NO: 5119
  Mutations within GlyA3B4 introduced by GmGlyA3B4_T03TALE nuclease

SEQ ID NO: 5152 - DNA, 469 bp, Artificial
  Mutations within GlyA3B4 introduced by GmGlyA3B4_T03TALE nuclease
gttcatgtacggttgcagatataaacgaagcatagcttatgtatgaggtgtaacaaaattggaaacaatagccatgcaaggtgaagaatgtcaccaactcagaaacccttcttcattgacgtgtccctcactcactctcctctcttcactataaatcgccactcttcgtgttctccacttcaccaactccttcaaacttattaacactttccttagttcaatatggggaagcccttcttcactctctctctttcttccctttgcttgctactcttgtcgagtgcatgctttgctattacctccagcaagtcgtgcgtaatattagtaagaagtatttatcagcttaacgtgataacaataatagtaatatgaaatatttattaaattttttataattaatctctgctagaaaatttgattaatcatttttagtagaatttgtttttctcaactaggtttttaaacacca

SEQ ID NO: 5153 - DNA, 578 bp, Artificial; identical to SEQ ID NO: 2133
  Mutations within GlyA3B4 introduced by GmGlyA3B4_T03TALE nuclease

SEQ ID NO: 5154 - DNA, 660 bp, Artificial
  Mutations within GlyA3B4 introduced by GmGlyA3B4_T03TALE nuclease
gttcatgtacggttgcagatataaacgaagcatagcttatgtatgaggtgtaacaaaattggaaacaatagccatgcaaggtgaagaatgtcaccaactcagaaacccttcttcattgacgtgtccctcactcactctcctctcttcactataaatcgccactcttcgtgttctccacttcaccaactccttcaaacttattaacactttccttagttcaatatggggaagcccttcttcactctctctctttcttccctttgcttgctactcttgtcgagtgcatgctttgctattacctccagcaagtgccaactcaacaacctcaacgcgttggaacccgaccaccgcgttgagtccgaaggtggtcttattgaaacatggaactctcaacaccctgagctgcaatgcgccggtgtcactgtttccaaacgcaccctcaaccgcaacggcctccacttgccatcttactcaccttatccccaaatgatcattgtcgttcaaggtgcgtaatattagtaagaagtatttatcagcttaacgtgataacaatatagtaatatgaaatatttattaaatttttataattaatctctgctagaaaatttgattaatcattttagtagaatttgttttctcaactaggtttttaaaacacca

SEQ ID NO: 5155 - DNA, 663 bp, Artificial
  Mutations within GlyA3B4 introduced by GmGlyA3B4_T03TALE nuclease
gttcatgtacggttgcagatataaacgaagcatagcttatgtatgaggtgtaacaaaattggaaacaatagccatgcaaggtgaagaatgtcaccaactcagaaacccttcttcattgacgtgtccctcactcactctcctctcttcactataaatcgccactcttcgtgttctccacttcaccaactccttcaaacttattaacactttccttagttcaatatggggaagcccttcttcactctctctctttcttccctttgcttgctactcttgtcgagtgcatgctttgctattacctccagcaagttcgagtgccaactcaacaacctcaacgcgttggaacccgaccaccgcgttgagtccgaaggtggtcttattgaaacatggaactctcaacaccctgagctgcaatgcgccggtgtcactgtttccaaacgcaccctcaaccgcaacggcctccacttgccatcttactcaccttatccccaaatgatcattgtcgttcaaggtgcgtaatattagtaagagtatttatcagcttaacgtgataacaatatagtaatatgaaatatttattaaatttttataattaatctctgctagaaaatttgattaatcattttagtagaatttgttttctcaactaggttttaaacacca

SEQ ID NO: 5156 - DNA, 620 bp, Artificial
  Mutations within GlyA3B4 introduced by GmGlyA3B4_T03TALE nuclease
gttcatgtacggttgcagatataaacgaagcatagcttatgtatgaggtgtaacaaaattggaaacaatagccatgcaaggtgaagaatgtcaccaactcagaaacccttcttcattgacgtgtccctcactcactctcctctcttcactataaatcgccactcttcgtgttctccacttcaccaactccttcaaacttattaacactttccttagttcaatatggggaagcccttcttcactctctctctttcttccctttgcttgctactcttgtcgagtgccaactcaacaacctcaacgcgttggaacccgaccaccgcgttgagtcccgaaggtggtcttattgaaacatggaactctcaacaccctgagctgcaatgcgccggtgtcactgtttccaaacgcaccctcaaccgcaacggcctccacttgccatcttactcaccttatccccaaatgatcattgtcgttcaaggtgcgtaatattagtaagaagtatttatcagcttaacgtgataacaataatagtaatatgaaatatttattaaattttttataattaatctctgctagaaaatttgattaatcatttttagtagaatttgtttttctcaact

SEQ ID NO: 5157 - DNA, 613 bp, Artificial
  Mutations within GlyA3B4 introduced by GmGlyA3B4_T03TALE nuclease
gttcatgtacggttgcagatataaacgaagcatagcttatgtatgaggtgtaacaaaattggaaacaatagccatgcaaggtgaagaatgtcaccaactcagaaacccttcttcattgacgtgtccctcactcactctcctctcttcactataaatcgccactcttcgtgttctccacttcaccaactccttcaaacttattaacactttccttagttcaatatggggaagcccttcttcactctctctctttcttccctttgcttccaactcaacaactcaacgcgttggaacccgaccaccgcgttgagtccgaaggtggtcttattgaaacatggaactctcaacaccctgagctgcaatgcgccggtgtcactgtttccaaacgcaccctcaaccgcaacggcctccacttgccatcttactcaccttatccccaaatgatcattgtcgttcaaggtgcgtaatattagtaagaagtatttatcagcttaacgtgataacaataatagtaatatgaaatatttattaatttttataattaatctctgctagaaaatttgattaatcatttttagtagaatttgtttttctcaactaggtttttaaaaca

SEQ ID NO: 5158 - DNA, 538 bp, Artificial
  Mutations within GlyA3B4 introduced by GmGlyA3B4_T03TALE nuclease
gttcatgtacggttgcagatataaacgaagcatagcttatgtatgaggtgtaacaaaattggaaacaatagccatgcaaggtgaagaatgtcaccaactcagaaaccctcttcattgacgtgtccctcactcactctcctctcttcactataaatcgccactcttcgtgttctccacttcaccaactccttcaaacttattaacactttccttagttcaatatggggaagcccttcttcactctctctctttcttccctttgcgttggaacccgaccaccgcgttgagtccgaaggtggtcttattgaaacatggaactctcaacaccctgagctgcaatgcgccggtgtcactgtttccaaacgcaccctcaaccgcaacggcctccacttgccatcttactcaccttatccccaaatgatcattgtcgttcaaggtgcgtaatattagtaagaagtatttatcagcttaacgtgataacaataatagtaatatgaaatatttattaaattttttataattaatctctgctagaaaa

SEQ ID NO: 5159 - DNA, 632 bp, Artificial
  Mutations within GlyA3B4 introduced by GmGlyA3B4_T03TALE nuclease
gttcatgtacggttgcagatataaacgaagcatagcttatgtatgaggtgtaacaaaattggaaacaatagccatgcaaggtgaagaatgtcaccaactcagaaacccttcttcattgacgtgtccctcactcactctcctctcttcactataaatcgccactcttcgtgttctccacttcaccaactccttcaaacttattaacactttccttagttcaatatggggaagcccttcttcactctctctctttcttccctttgcttgctactcttgtcgagtgccaactcaacaacctcaacgcgttggaacccgaccaccgcgttgagtcccgaaggtggtcttattgaaacatggaactctcaacaccctgagctgcaatgcgccggtgtcactgtttccaaacgcaccctcaaccgcaacggcctccacttgccatcttactcaccttatccccaaatgatcattgtcgttcaaggtgcgtaatattagtaagaagtatttatcagcttaacgtgataacaataatagtaatatgaaatatttattaaattttttataattaatctctgctagaaaatttgattaatcatttttagtagaatttgtttttctcaactaggttttaaaca

SEQ ID NO: 5160 - DNA, 604 bp, Artificial
  Mutations within GlyA3B4 introduced by GmGlyA3B4_T03TALE nuclease
gttcatgtacggttgcagatataaacgaagcatagcttatgtatgaggtgtaacaaaattggaaacaatagccatgcaaggtgaagaatgtcaccaactcagaaacccttcttcattgacgtgtccctcactcactctcctctcttcactataaatcgccactcttcgtgttctccacttcaccaactccttcaaacttattaacactttccttagttcaatatggggaagcccttcttcactctctctctttcttccctttgcttgctactcttgtcgagtgcatgctttgctattaaaacatggaactcactgagtccgaaggtggtcttattgaaacatggaactctcaacaccctgagctgcaatgcgccggtgtcactgtttccaaacgcaccctcaaccgcaacggcctccacttgccatcttactcaccttatccccaaatgatcattgtcgttcaaggtgcgtaatattagtaagaagtatttatcagcttaacgtgataacaataatagtaatatgaaatatttattaatttttataattaatctctgctagaaaatttgattaatcatttttagtagaatttgtttttctcaac

SEQ ID NO: 5161 - DNA, 405 bp, Artificial
  Mutations within GlyA3B4 introduced by GmGlyA3B4_T03TALE nuclease
gttcatgtacggttgcagatataaacgaagcatagcttatgtatgaggtgtaacaaaattggaaacaatagccatgcaaggtgaagaatgtcaccaactcagaaacccttcttcattgacgtgtccctcactcactctcctctcttcactataaatcgccactcttcgtgttctccacttcaccaactccttcaaacttattaacactttccttagttcaatatggggaagcccttcttcactctctctctttcttccctttgcttgctactcttgtcgagtgcatgctttgctattacctccagcaagttcaacaataatagtaatatgaaatatttattaaattttttataattaatctctgctagaaaatttgattaatcatttttagtagaatttgttttt

SEQ ID NO: 5162 - DNA, 664 bp, Artificial; identical to SEQ ID NO: 5123
  Mutations within GlyA3B4 introduced by GmGlyA3B4_T03TALE nuclease

SEQ ID NO: 5163 - DNA, 652 bp, Artificial
  Mutations within GlyA3B4 introduced by GmGlyA3B4_T03TALE nuclease
gttcatgtacggttgcagatataaacgaagcatagcttatgtatgaggtgtaacaaaattggaaacaatagccatgcaaggtgaagaattgtcaccaactcagaaacccttcttcattgacgtgtccctcactcactctcctctcttcactataaatcgccactcttcgtgttctccacttcaccaactccttcaaacttattaacactttccttagttcaatatggggaagcccttcttcactctctctctttcttccctttgcttgctactcttgtcgagtgcatgctttgctattacctccagcaagtgccaactcaacaacctcaacgcgttggaacccgaccaccgcgttgagtccgaaggtggtcttattgaaacatggaactctcaacaccctgagctgcaatgcgccggtgtcactgtttccaaacgcaccctcaaccgcaacggcctccacttgccatcttactcaccttatccccaaatgatcattgtcgttcaaggtgcgtaatattagtaagaagtatttatcagcttaacgtgataacaataatagtaatatgaaatatttattaaatttttataattaatctctgctagaaaatttgattaatcattttagtagaatttgttttctcaactaggtttt

SEQ ID NO: 5164 - DNA, 624 bp, Artificial
  Mutations within GlyA3B4 introduced by GmGlyA3B4_T03TALE nuclease
gttcatgtacggttgcagatataaacgaagcatagcttatgtatgaggtgtaacaaaattggaaacaatagccatgcaaggtgaagaatgtcaccaactcagaaacccttcttcattgacgtgtccctcactcactctcctctcttcactataaatcgccactcttcgtgttctccacttcaccaactccttcaaacttattaacactttccttagttcaatatggggaagcccttcttcactctctctctttcttccctttgcttgctactcttgtcgagtgcatgctttgctattacctccagcaagtcaacaacctcaacgcgttggaacccgaccaccgcgttgagtccgaaggtggtcttattgaaacatggaactctcaacaccctgagctgcaatgcgccggtgtcactgtttccaaacgcaccctcaaccgcaacggcctccacttgccatcttactcaccttatccccaaatgatcattgtcgttcaaggtgcgtaatattagtaagaagtatttatcagcttaacgtgataacaataatagtaatatgaaatatttattaaattttttataattaatctctgctagaaaatttgattaatcatttttagtagaa

SEQ ID NO: 5165 - DNA, 656 bp, Artificial
  Mutations within GlyA3B4 introduced by GmGlyA3B4_T03TALE nuclease
gttcatgtacggttgcagatataaacgaagcatagcttatgtatgaggtgtaacaaaattggaaacaatagccatgcaaggtgaagaatgtcaccaactcagaaacccttcttcattgacgtgtccctcactcactctcctctcttcactataaatcgccactcttcgtgttctccacttcaccaactccttcaaacttattaacactttccttagttcaatatggggaagcccttcttcactctctctctttcttccctttgcttgctactcttgtcgagtgcatgctttgctattacctccagcaaagtgccaactcaacaacctcaacgcgttggaacccgaccaccgcgttgagtccgaaggtggtcttattgaaacatggaactctcaacaccctgagctgcaatgcgccggtgtcactgtttccaaacgcaccctcaaccgcaacggcctccacttgccatcttactcaccttatccccaaatgatcattgtcgttcaaggtgcgtaatattagtaagaagtatttatcagcttaacgtgataacaataatagtaatatgaaatatttattaaatttttataattaatctctgctagaaaatttgattaatcattttagtagaatttgttttctcaactaggttttaaaa

SEQ ID NO: 5166 - DNA, 644 bp, Artificial; identical to SEQ ID NO: 4919
  Mutations within GlyA3B4 introduced by GmGlyA3B4_T03TALE nuclease

SEQ ID NO: 5167 - DNA, 646 bp, Artificial; identical to SEQ ID NO: 5043
  Mutations within GlyA3B4 introduced by GmGlyA3B4_T03TALE nuclease

SEQ ID NO: 5168 - DNA, 646 bp, Artificial
  Mutations within GlyA3B4 introduced by GmGlyA3B4_T03TALE nuclease
gttcatgtacggttgcagatataaacgaagcatagcttatgtatgaggtgtaacaaaattggaaacaatagccatgcaaggtgaagaatgtcaccaactcagaaacccttcttcattgacgtgtccctcactcactctcctctcttcactataaatcgccactcttcgtgttctccacttcaccaactccttcaaacttattaacactttccttagttcaatatggggaagcccttcttcactctctctctttcttccctttgcttgctactcttgtcgagtgcatgctttgctattacctccagcaagttgagtgccaactcaacaacctcaacgcgttggaacccgaccaccgcgttgagtccgaaggtggtcttattgaaacatggaactctcaacaccctgagctgcaatgcgccggtgtcactgtttccaaacgcaccctcaaccgcaacggcctccacttgccatcttactcaccttatccccaaatgatcattgtcgttcaaggtgcgtaatattagtaagaagtatttatcagcttaacgtgataacaataatagtaatatgaaatatttattaaatttttataattaatctctgctagaaaatttgattaatcattttagtagaatttgtttttctc

SEQ ID NO: 5169 - DNA, 634 bp, Artificial
  Mutations within GlyA3B4 introduced by GmGlyA3B4_T03TALE nuclease
gttcatgtacggttgcagatataaacgaagcatagcttatgtatgaggtgtaacaaaattggaaacaatagccatgcaaggtgaagaatgtcaccaactcagaaacccttcttcattgacgtgtccctcactcactctcctctcttcactataaatcgccactcttcgtgttctccacttcaccaactccttcaaacttattaacactttccttagttcaatatggggaagcccttcttcactctctctctttcttccctttgcttgctactcttgtcgagtgcatgctttgctattacctccagcaagttgccaactcaacaacctcaacgcgttggaacccgaccaccgcgttgagtccgaaggtggtcttattgaaacatggaactctcaacaccctgagctgcaatgcgccggtgtcactgtttccaaacgcaccctcaaccgcaacggcctccacttgccatcttactcaccttatccccaaatgatcattgtcgttcaaggtgcgtaatattagtaagaagtatttatcagcttaacgtgataacaataatagtaatatgaaatatttattaaatttttataattaatctctgctagaaaatttgattaatcattttagtagaatttg

SEQ ID NO: 5170 - DNA, 630 bp, Artificial
  Mutations within GlyA3B4 introduced by GmGlyA3B4_T03TALE nuclease
gttcatgtacggttgcagatataaacgaagcatagcttatgtatgaggtgtaacaaaattggaaacaatagccatgcaaggtgaagaatgtcaccaactcagaaacccttcttcattgacgtgtccctcactcactctcctctcttcactataaatcgccactcttcgtgttctccacttcaccaactccttcaaacttattaacactttccttagttcaatatggggaagcccttcttcactctctctctttcttccctttgcttgctactcttgtcgagtgcatgctttgctattacctccagcaagccaactcaacaacctcaacgcgttggaacccgaccaccgcgttgagtccgaaggtggtcttattgaaacatggaactctcaacaccctgagctgcaatgcgccggtgtcactgtttccaaacgcaccctcaaccgcaacggcctccacttgccatcttactcaccttatccccaaatgatcattgtcgttcaaggtgcgtaatattagtaagaagtatttatcagcttaacgtgataacaataatagtaatatgaaatatttattaaatttttataattaatctctgctagaaaatttgattaatcattttagtagaattt

SEQ ID NO: 5171 - DNA, 630 bp, Artificial; identical to SEQ ID NO: 4899
  Mutations within GlyA3B4 introduced by GmGlyA3B4_T03TALE nuclease

SEQ ID NO: 5172 - DNA, 632 bp, Artificial
  Mutations within GlyA3B4 introduced by GmGlyA3B4_T03TALE nuclease
gttcatgtacggttgcagatataaacgaagcatagcttatgtatgaggtgtaacaaaattggaaacaatagccatgcaaggtgaagaatgtcaccaactcagaaacccttcttcattgacgtgtccctcactcactctcctctcttcactataaatcgccactcttcgtgttctccacttcaccaactccttcaaacttattaacactttccttagttcaatatggggaagcccttcttcactctctctctttcttccctttgcttgctactcttgtcgagtgcatgctttgctattacctccagcaaggccaactcaacaacctcaacgcgttggaacccgaccaccgcgttgagtccgaaggtggtcttattgaaacatggaactctcaacaccctgagctgcaatgcgccggtgtcactgtttccaaacgcaccctcaaccgcaacggcctccacttgccatcttactcaccttatccccaaatgatcattgtcgttcaaggtgcgtaatattagtaagaagtatttatcagcttaacgtgataacaataatagtaatatgaaatatttattaaatttttataattaatctctgctagaaaatttgattaatcattttagtagaatttg

SEQ ID NO: 5173 - DNA, 637 bp, Artificial; identical to SEQ ID NO: 5000
  Mutations within GlyA3B4 introduced by GmGlyA3B4_T03TALE nuclease
  misc_feature (532): n is a or c or t or g

SEQ ID NO: 5174 - DNA, 660 bp, Artificial; identical to SEQ ID NO: 4874
  Mutations within GlyA3B4 introduced by GmGlyA3B4_T03TALE nuclease

SEQ ID NO: 5175 - DNA, 669 bp, Artificial
  Mutations within GlyA3B4 introduced by GmGlyA3B4_T03TALE nuclease
  misc_feature (533): n is a or c or t or g
gttcatgtacggttgcagatataaacgaagcatagcttatgtatgaggtgtaacaaaattggaaacaatagccatgcaaggtgaagaatgtcaccaactcagaaacccttcttcattgacgtgtccctcactcactctcctctcttcactataaatcgccactcttcgtgttctccacttcaccaactccttcaaacttattaacactttccttagttcaatatggggaagcccttcttcactctctctctttcttccctttgcttgctactcttgtcgagtgcatgctttgctattacctccagcaagttcgagtgccaactcaacaacctcaacgcgttggaacccgaccaccgcgttgagtccgaaggtggtcttattgaaacatggaactctcaacaccctgagctgcaatgcgccggtgtcactgtttccaaacgcaccctcaaccgcaacggcctccacttgccatcttactcaccttatccccaaatgatcattgtcgttcaaggtgcgtaatattagtaagaagnatttatcagcttaacgtgataacaataatagtaatatgaaatatttattaaatttttataattaatctctgctagaaaatttgattaatcattttagtagaatttgttttctcaactaggtttttaaaacaccaca

SEQ ID NO: 5176 - DNA, 520 bp, Artificial
  Mutations within GlyA3B4 introduced by GmGlyA3B4_T03TALE nuclease
gttcatgtacggttgcagatataaacgaagcatagcttatgtatgaggtgtaacaaaattggaaacaatagccatgcaaggtgaagaatgtcaccaactcagaaacccttcttcattgacgtgtccctcactcactctcctctcttcactataaatcgccactcttcgtgttctccacttcaccaactccttcaaacttattaacactttccttagttcaatatggggaagcccttcttcactctcttggaacccgaccaccgcgttgagtccgaaggtggtcttattgaaacatggaactctcaacaccctgagctgcaatgcgccggtgtcactgtttccaaacgcaccctcaaccgcaacggcctccacttgccatcttactcaccttatccccaaatgatcattgtcgttcaaggtgcgtaatattagtaagaagtatttatcagcttaacgtgataacaataatagtaatatgaaatatttattaaattttttataattaatctctgctagaaaa

SEQ ID NO: 5177 - DNA, 658 bp, Artificial
  Mutations within GlyA3B4 introduced by GmGlyA3B4_T03TALE nuclease
gttcatgtacggttgcagatataaacgaagcatagcttatgtatgaggtgtaacaaaattggaaacaatagccatgcaaggtgaagaatgtcaccaactcagaaacccttcttcattgacgtgtccctcactcactctcctctcttcactataaatcgccactcttcgtgttctccacttcaccaactccttcaaacttattaacactttccttagttcaatatggggaagcccttcttcactctctctctttcttccctttgcttgctactcttgtcgagtgcatgctttgctattacctccagcaagttcaactcaacaacctcaacgcgttggaacccgaccaccgcgttgagtccgaaggtggtcttattgaaacatggaactctcaacaccctgagctgcaatgcgccggtgtcactgtttccaacgcaccctcaaccgcaacggcctccacttgccatcttactcaccttatccccaaatgatcattgtcgttcaaggtgcgtaatattagtaagaagtatttatcagcttaacgtgataacaataatagtaatatgaaatatttattaaatttttataattaatctctgctagaaaatttgattaatcattttagtagaatttgttttctcaactaggttttaaaacacca

SEQ ID NO: 5178 - DNA, 662 bp, Artificial; identical to SEQ ID NO: 5142
  Mutations within GlyA3B4 introduced by GmGlyA3B4_T03TALE nuclease

SEQ ID NO: 5179 - DNA, 651 bp, Artificial
  Mutations within GlyA3B4 introduced by GmGlyA3B4_T03TALE nuclease
gttcatgtacggttgcagatataaacgaagcatagcttatgtatgaggtgtaacaaaattggaaacaatagccatgcaaggtgaagaatgtcaccaactcagaaacccttcttcattgacgtgtccctcactcactctcctctcttcactataaatcgccactcttcgtgttctccacttcaccaactccttcaaacttattaacactttccttagttcaatatggggaagcccttcttcactctctctctttcttccctttgcttgctactcttgtcgagtgcatgctttgctattacctccagcaagttcaacaacctcaacgcgttggaacccgaccaccgcgttgagtccgaaggtggtcttattgaaacatggaactctcaacaccctgagctgcaatgcgccggtgtcactgtttccaaacgcaccctcaaccgcaacggcctccacttgccatcttactcaccttatccccaaatcgatcattgtcgttcaaggtgcgtaaatattagtaagaagtatttatcagcttaacgtgataacaataatagtaatatgaaatatttattaaattttttataattaatctctgctagaaaatttgattaatcatttttagtagaatttgttttttctcaactaggtttt

SEQ ID NO: 5180 - DNA, 639 bp, Artificial
  Mutations within GlyA3B4 introduced by GmGlyA3B4_T03TALE nuclease
gttcatgtacggttgcagatataaacgaagcatagcttatgtatgaggtgtaacaaaattggaaacaatagccatgcaaggtgaagaatgtcaccaactcagaaacccttcttcattgacgtgtccctcactcactctcctctcttcactataaatcgccactcttcgtgttctccacttcaccaactccttcaaacttattaacactttccttagttcaatatggggaagcccttcttcactctctctctttcttccctttgcttgctactcttgtcgagtgcatgctttgctattacctccagcgttggaacccgaccaccgcgttgagtccgaaggtggtcttattgaacatggaactctcaacaccctgagctgcaatgcgccggtgtcactgtttccaaacgcaccctcaaccgcaacggcctccacttgccatcttactcaccttatccccaaatgatcattgtcgttcaaggtgcgtaatattagtaagaagtatttatcagcttaacgtgataacaataatagtaatatgaaatatttattaaattttttataattaattctctgctagaaaatttgattaatcatttttagtagaatttgttttttctcaactaggttttaaacaccaca

SEQ ID NO: 5181 - DNA, 520 bp, Artificial
  Mutations within GlyA3B4 introduced by GmGlyA3B4_T03TALE nuclease
gttcatgtacggttgcagatataaacgaagcatagcttatgtatgaggtgtaacaaaattggaaacaatagccatgcaaggtgaagaatgtcaccaactcagaaacccttcttcattgacgtgtccctcactcactctcctctcttcactataaatcgccactcttcgtgttctccacttcaccaactccttcaaacttattaacactttccttagttcaatatggggaagcccttcttcactctctctctttcttccctttgcttgctactcttgtcgagtgcatgctttgctattacctccagcaagttcgcctccacttgccatcttactcaccttatccccaaatgatcattgtcgttcaaggtgcgtaatattagtaagaagtattttatcagcttaacgtgataacaataatagtaatatgaaatatttattaaattttttataattaatctctgctagaaaatttgattaatcatttttagtagaatttgtttttctcaactaggtttaaaca

SEQ ID NO: 5182 - DNA, 646 bp, Artificial; identical to SEQ ID NO: 4907
  Mutations within GlyA3B4 introduced by GmGlyA3B4_T03TALE nuclease

SEQ ID NO: 5183 - DNA, 656 bp, Artificial
  Mutations within GlyA3B4 introduced by GmGlyA3B4_T03TALE nuclease
gttcatgtacggttgcagatataaacgaagcatagcttatgtatgaggtgtaacaaaattggaaacaatagccatgcaaggtgaagaatgtcaccaactcagaaacccttcttcattgacgtgtccctcactcactctcctctcttcactataaatcgccactcttcgtgttctccacttcaccaactccttcaaacttattaacactttccttagttcaatatggggaagcccttcttcactctctctctttcttccctttgcttgctactcttgtcgagtgcatgctttgctattacctccagcaagtagtgccaactcaacaacctcaacgcgttggaacccgaccaccgcgttgagtccgaaggtggtcttattgaaacatggaactctcaacaccctgagctgcaatgcgccggtgtcactgtttccaaacgcaccctcaaccgcaacggcctccacttgccatcttactcaccttatccccaaatgatcattgtcgttcaaggtgcgtaatattagtaagaagtatttatcagcttaacgtgataacaatatagtaatatgaaatatttattaaatttttataattaatctctgctagaaaatttgattaatcattttagtagaatttgttttctcaactaggttttaaa

SEQ ID NO: 5184 - DNA, 638 bp, Artificial
  Mutations within GlyA3B4 introduced by GmGlyA3B4_T03TALE nuclease
  misc_feature (532): n is a or c or t or g
gttcatgtacggttgcagatataaacgaagcatagcttatgtatgaggtgtaacaaaattggaaacaatagccatgcaaggtgaagaatgtcaccaactcagaaacccttcttcattgacgtgtccctcactcactctcctctcttcactataaatcgccactcttcgtgttctccacttcaccaactccttcaaacttattaacactttccttagttcaatatggggaagcccttcttcactctctctctttcttccctttgcttgctactcttgtcgagtgcatgctttgctattacctccagcaagttcgagtgccaactcaacaacctcaacgcgttggaacccgaccaccgcgttgagtccgaaggtggtcttattgaaacatggaactctcaacaccctgagctgcaatgcgccggtgtcactgtttccaaacgcaccctcaaccgcaacggcctccacttgccatcttactcaccttatccccaaatgatcattgtcgttcaaggtgcgtaatattagtaagagnatttatcagcttaacgtgataacaataatagtaatatgaaatatttattaaatttttataattaatctctgctagaaaatttgattaatcattttagtagaatttg

SEQ ID NO: 5185 - DNA, 659 bp, Artificial
  Mutations within GlyA3B4 introduced by GmGlyA3B4_T03TALE nuclease
gttcatgtacggttgcagatataaacgaagcatagcttatgtatgaggtgtaacaaaattggaaacaatagccatgcaaggtgaagaatgtcaccaactcagaaacccttcttcattgacgtgtccctcactcactctcctctcttcactataaatcgccactcttcgtgttctccacttcaccaactccttcaaacttattaacactttccttagttcaatatggggaagcccttcttcactctctctctttcttccctttgcttgctactcttgtcgagtgcatgctttgctattacctccagcaatgccaactcaataacctcaacgcgttggaacccgaccaccgcgttgagtccgaaggtggtcttattgaaacatggaactctcaacaccctgagctgcaatgcgccggtgtcactgtttccaaacgcaccctcaaccgcaacggcctccacttgccatcttactcaccttatccccaaatgatcattgtcgttcaaggtgcgtaatattagtaagaagtatttatcagcttaacgtgataacaatatagtaatatgaaatatttattaaatttttataattaatctctgctagaaaatttgattaatcattttagtagaatttgttttctcaactaggtttttaaaacacca

SEQ ID NO: 5186 - DNA, 635 bp, Artificial
  Mutations within GlyA3B4 introduced by GmGlyA3B4_T03TALE nuclease
gttcatgtacggttgcagatataaacgaagcatagcttatgtatgaggtgtaacaaaattggaaacaatagccatgcaaggtgaagaatgtcaccaactcagaaacccttcttcattgacgtgtccctcactcactctcctctcttcactataaatcgccactcttcgtgttctccacttcaccaactccttcaaacttattaacactttccttagttcaatatggggaagcccttcttcactctctctctttcttccctttgcttgctactcttgtcgagtgcatgctttgctattacctccagcaagtagtgccaactcaacaacctcaacgcgttggaacccgaccaccgcgttgagtccgaaggtggtcttattgaaacatggaactctcaacaccctgagctgcaatgcgccggtgtcactgtttccaaacgcaccctcaaccgcaacggcctccacttgccatcttactcaccttatccccaaatgatcattgtcgttcaaggtgcgtaatattagtaagaagtatttatcagcttaacgtgataacaatatagtaatatgaaatatttattaaatttttataattaatctctgctagaaaatttgattaatcattttagtagaatttg

SEQ ID NO: 5187 - DNA, 665 bp, Artificial; identical to SEQ ID NO: 4810
  Mutations within GlyA3B4 introduced by GmGlyA3B4_T03TALE nuclease

SEQ ID NO: 5188 - DNA, 504 bp, Artificial
  Mutations within GlyA3B4 introduced by GmGlyA3B4_T03TALE nuclease
gttcatgtacggttgcagatataaacgaagcatagcttatgtatgaggtgtaacaaaattggaaacaatagccatgcaaggtgaagaatgtcaccaactcagaaacccttcttcattgacgtgtccctcactcactctcctctcttcactataaatcgccactcttcgtgttctccacttcaccaactccttcaaacttattaacactttccttagttcaatatggggaagcccttcttcactctctctctttcttcccgaccaccgcgttgagtccgaaggtggtcttattgaaacatggaactctcaacaccctgagctgcaatgcgccggtgtcactgtttccaaacgcaccctcaaccgcaacggcctccacttgccatcttactcaccttatccccaaatgatcattgtcgttcaaggtgcgtaatattagtaagaagtatttatcagcttaacgtgataacaataatagtaatatgaaatatttattaaattttttat

SEQ ID NO: 5189 - DNA, 655 bp, Artificial
  Mutations within GlyA3B4 introduced by GmGlyA3B4_T03TALE nuclease
gttcatgtacggttgcagatataaacgaagcatagcttatgtatgaggtgtaacaaaattggaaacaatagccatgcaaggtgaagaatgtcaccaactcagaaacccttcttcattgacgtgtccctcactcactctcctctcttcactataaatcgccactcttcgtgttctccacttcaccaactccttcaaacttattaacactttccttagttcaatatggggaagcccttcttcactctctctctttcttccctttgcttgctactcttgtcgagtgcatgctttgctattacctccagcaagttagtgccaactcaacaacctcaacgcgttggaacccgaccaccgcgttgagtccgaaggtggtcttattgaaacatggaactctcaacaccctgagctgcaatgcgccggtgtcactgtttccaaacgcaccctcaaccgcaacggcctccacttgccatcttactcaccttatccccaaatgatcattgtcgttcaaggtgcgtaatattagtaagaagtatttatcagcttaacgtgataacaataatagtaatatgaaatatttattaaatttttataattaatctctgctagaaaatttgattaatcattttagtagaatttgttttctcaactaggtttt

SEQ ID NO: 5190 - DNA, 409 bp, Artificial
  Mutations within GlyA3B4 introduced by GmGlyA3B4_T03TALE nuclease
gttcatgtacggttgcagatataaacgaagcatagcttatgtatgaggtgtaacaaaattggaaacaatagccatgcaaggtgaagaatgtcaccaactcagaaacccttcttcattgacgtgtccctcactcactctcctctcttcactataaatcgccactcttcgtgttctccacttcaccaactccttcaaacttattaacactttccttagttcaatatggggaagcccttcttcactctctctctttcttccctttgcttgctactcttgtcgagtgcatgctttgctattacctccagcaagttcaacgacgtagctagccatcactcaaacctcaaaccgcgtttggcaaacccggcagttggaacccccgaaccccgcaccggcttggattggatgcctg

SEQ ID NO: 5191 - DNA, 646 bp, Artificial
  Mutations within GlyA3B4 introduced by GmGlyA3B4_T03TALE nuclease
gttcatgtacggttgcagatataaacgaagcatagcttatgtatgaggtgtaacaaaattggaaacaatagccatgcaaggtgaagaatgtcaccaactcagaaacccttcttcattgacgtgtccctcactcactctcctctcttcactataaatcgccactcttcgtgttctccacttcaccaactccttcaaacttattaacactttccttagttcaatatggggaagcccttcttcactctctctctttcttccctttgcttgctactcttgtcgagtgcatgctttgctattacctccagcaagtagtgccaactcaacaacctcaacgcgttggaacccgaccaccgcgttgagtccgaaggtggtcttattgaaacatggaactctcaacaccctgagctgcaatgcgccggtgtcactgtttccaaacgcaccctcaaccgcaacggcctccacttgccatcttactcaccttatccccaaatgatcattgtcgttcaaggtgcgtaatattagtaagaagtatttatcagcttaacgtgataacaataatagtaatatgaaatatttattaaatttttataattaatctctgctagaaaatttgattaatcattttagtagaatttgtttttctcaa

SEQ ID NO: 5192 - DNA, 571 bp, Artificial
  Mutations within GlyA3B4 introduced by GmGlyA3B4_T03TALE nuclease
gttcatgtacggttgcagatataaacgaagcatagcttatgtatgaggtgtaacaaaattggaaacaatagccatgcaaggtgaagaatgtcaccaactcagaaacccttcttcattgacgtgtccctcactcactctcctctcttcactataaatcgccactcttcgtgttctccacttcaccaactccttcaaacttattaacactttccttagttcaatatggggaagcccttcttcactctctctctttcttccctttgcttgctactcttgtcgagtgcatgctttgctattacctccagcaactcaacgcgttggaacccgaccaccgcgttgagtccgaaggtggtcttattgaaacatggaactctcaacacctgagctgcatgcgccggtgtcactgtttccaaacgcaccctcaaccgcaacggcctccacttgccatcttactcaccttatccccaaatgatcattgtccgttcaaggtgcgtaatattagtcaagaagttatttatcagcttaacgtgataacaataatagtaatatgaaatatttattaaatttttta

SEQ ID NO: 5193 - DNA, 576 bp, Artificial
  Mutations within GlyA3B4 introduced by GmGlyA3B4_T03TALE nuclease
gttcatgtacggttgcagatataaacgaagcatagcttatgtatgaggtgtaacaaaattggaaacaatagccatgcaaggtgaagaatgtcaccaactcagaaacccttcttcattgacgtgtccctcactcactctcctctcttcactataaatcgccactcttcgtgttctccacttcaccaactccttcaaacttattaacactttccttagttcaatatggggaagcccttcttcactcaacgcggtggtcaacaacctcaacgcgttggaaccgaccaccgcgttgagtccgaaggtggtcttattgaaacatggaactctcaacaccctgagctgcaatgcgccggtgtcactgtttccaaacgcaccctcaaccgcaacggcctccacttgccatcttactcaccttatccccaaaatgatcattgtcgttcaaggtgcgtaatattagtaagaagtatttatcagcttaacgtgataacaataatagtaatatgaatatttattaaatttttataattaatctctgctagaaaatttgattaatcatttttagtagaatttgttttt

SEQ ID NO: 5194 - DNA, 660 bp, Artificial; identical to SEQ ID NO: 4874
  Mutations within GlyA3B4 introduced by GmGlyA3B4_T03TALE nuclease

SEQ ID NO: 5195 - DNA, 653 bp, Artificial
  Mutations within GlyA3B4 introduced by GmGlyA3B4_T03TALE nuclease
gttcatgtacggttgcagatataaacgaagcatagcttatgtatgaggtgtaacaaaattggaaacaatagccatgcaaggtgaagaatgtcaccaactcagaaacccttcttcattgacgtgtccctcactcactctcctctcttcactataaatcgccactcttcgtgttctccacttcaccaactccttcaaacttattaacactttccttagttcaatatggggaagcccttcttcactctctctctttcttccctttgcttgctactcttgtcgagtgcatgctttgctattacctccagcaagttcagtgccaactcaacaacctcaacgcgttggaacccgaccaccgcgttgagtccgaaggtggtcttattgaaacatggaactctcaacaccctgagctgcaatgcgccggtgtcactgtttccaaacgcaccctcaaccgcaacggcctccacttgccatcttactcaccttatccccaaatgatcattgtcgttcaaggtgcgtaatattagtaagaagtatttatcagcttaacgtgataacaatatagtaatatgaaatatttattaaattttattaattaatctctgctagaaaatttgattaatcatttttagtagaatttgtttttctcaactagg

SEQ ID NO: 5196 - DNA, 620 bp, Artificial
  Mutations within GlyA3B4 introduced by GmGlyA3B4_T03TALE nuclease
gttcatgtacggttgcagatataaacgaagcatagcttatgtatgaggtgtaacaaaattggaaacaatagccatgcaaggtgaagaatgtcaccaactcagaaacccttcttcattgacgtgtccctcactcactctcctctcttcactataaatcgccactcttcgtgttctccacttcaccaactccttcaaacttattaacactttccttagttcaatatggggaagcccttcttcactctctctctttcttccctttgcttgctactcttgtcgagtgcatgctttgctattacctccagcaagttcagtgccaactcaacaacctcaacgcgttggaacccgaccaccgcgttgagtccgaaggtggtcttattgaaacatggaactctcaacaccctgagctgcaatgcgccggtgtcactgtttccaaacgcaccctcaaccgcaacggcctccacttgccatcttactcaccttatccccaaatgatcattgtcgttcaaggtgcgtaatattagtaagaagtatttatcagcttaacgtgataacaataatagtaatatgaaatatttattaaatttttataattaatctctgctagaaaatttgattaa

SEQ ID NO: 5197 - DNA, 662 bp, Artificial
  Mutations within GlyA3B4 introduced by GmGlyA3B4_T03TALE nuclease
gttcatgtacggttgcagatataaacgaagcatagcttatgtatgaggtgtaacaaaattggaaacaatagccatgcaaggtgaagaatgtcaccaactcagaaacccttcttcattgacgtgtccctcactcactctcctctcttcactataaatcgccactcttcgtgttctccacttcaccaactccttcaaacttattaacactttccttagttcaatatggggaagcccttcttcactctctctctttcttccctttgcttgctactcttgtcgagtgcatgctttgctattacctccagcaagtgtgccaactcacaacctcaacgcgttggaacccgaccaccgcgttgagtccgaaggtggtcttattgaaacatggaactctcaacaccctgagctgcaatgcgccggtgtcactgtttccaaacgcaccctcaaccgcaacggcctccacttgccatcttactcaccttatccccaaatgatcattgtcgttcaaggtgcgtaatattagtaagaagtatttatcagcttaacgtgataacaataatagtaatatgaaatatttattaaatttttataattaatctctgctagaaaatttgattaatcattttagtagaatttgttttctcaactaggtttttaaaacacca

SEQ ID NO: 5198 - DNA, 659 bp, Artificial
  Mutations within GlyA3B4 introduced by GmGlyA3B4_T03TALE nuclease
gttcatgtacggttgcagatataaacgaagcatagcttatgtatgaggtgtaacaaaattggaaacaatagccatgcaaggtgaagaatgtcaccaactcagaaacccttcttcattgacgtgtccctcactcactctcctctcttcactataaatcgccactcttcgtgttctccacttcaccaactccttcaaacttattaacactttccttagttcaatatggggaagcccttcttcactctctctctttcttccctttgcttgctactcttgtcgagtgcatgctttgctattacctccagcaagccaactcaacaacctcaacgcgttggaacccgaccaccgcgttgagtccgaaggtggtcttattgaaacatggaactctcaacaccctgagctgcaatgcgccggtgtcactgtttccaaacgcaccctcaaccgcaacggcctccacttgccatcttactcaccttatccccaaatgatcattgtcgttcaaggtgcgtaatattagtaagaagtatttatcagcttaacgtgataacaataatagtaatatgaaatatttattaaatttttataattaatctctgctagaaaatttgattaatcattttagtagaatttgttttctcaactaggtttttaaaacacca

SEQ ID NO: 5199 - DNA, 720 bp, Artificial
  Mutations within GlyA3B4 introduced by GmGlyA3B4_T03TALE nuclease
gttcatgtacggttgcagatataaacgaagcatagcttatgtatgaggtgtaacaaaattggaaacaatagccatgcaaggtgaagaatgtcaccaactcagaaacccttcttcattgacgtgtccctcactcactctcctctcttcactataaatcgccactcttcgtgttctccacttcaccaactccttcaaacttattaacactttccttagttcaatatggggaagcccttcttcactctctctctttcttccctttgcttgctactcttgtcgagtgcatgctttgctattacctccagcaagttcttgaccccggagcaggtggtggccatcgccagccacgatggcggcaagcaggcggagtgccaactcaacaacctcaacgcgttggaacccgaccaccgcgttgagtccgaaggtggtcttattgaaacatggaactctcaacaccctgagctgcaatgcgccggtgtcactgtttccaaacgcaccctcaaccgcaacggcctccacttgccatcttactcaccttatccccaaatgatcattgtcgttcaaggtgcgtaatattagtaagaagtattttatcagcttaacgtgataacaataatagtaatatgaaatatttattaaattttttataaattaatctctgctagaaaatttgattaatctttttagtagaatttgtttttctcaactaggttttaaaca

SEQ ID NO: 5200 - DNA, 634 bp, Artificial
  Mutations within GlyA3B4 introduced by GmGlyA3B4_T03TALE nuclease
gttcatgtacggttgcagatataaacgaagcatagcttatgtatgaggtgtaacaaaattggaaacaatagccatgcaaggtgaagaatgtcaccaactcagaaacccttcttcattgacgtgtccctcactcactctcctctcttcactataaatcgccactcttcgtgttctccacttcaccaactccttcaaacttattaacactttccttagttcaatatggggaagcccttcttcactctctctctttcttccctttgcttgctactcttgtcgagtgcatgctttgctattacctccagcaaacgtgccaactcaacaacctcaacgcgttggaacccgaccaccgcgttgagtccgaaggtggtcttattgaaacatggaactctcaacaccctgagctgcaatgcgccggtgtcactgtttccaaacgcaccctcaaccgcaacggcctccacttgccatcttactcaccttatccccaaatgatcattgtcgttcaaggtgcgtaatattagtaagaagtatttatcagcttaacgtgataacaatatagtaatatgaaatatttattaaatttttataattaatctctgctagaaaatttgattaatcattttagtagaatttg

SEQ ID NO: 5201 - DNA, 439 bp, Artificial
  Mutations within GlyA3B4 introduced by GmGlyA3B4_T03TALE nuclease
gttcatgtacggttgcagatataaacgaagcatagcttatgtatgaggtgtaacaaaattggaaacaatagccatgcaaggtgaagaatgtcaccaactcagaaacccttcttcattgacgtgtccctcactcactctcctctcttcactataaatcgccactcttcgtgttctccacttcaccaactccttcaaacttattaacactttccttagttcaatatggggaagcccttcttcactctctctctttcttccctttgcttgctactcttgtcgagtgcatgctttgctattacctccagcaagtaagcttaacgtgataacaataatagtaatatgaaatatttattaaattttttataattaatctctgctagaaaatttgattaatcatttttagtagaattttgtttttctcaactaggtttaaacacca

SEQ ID NO: 5202 - DNA, 600 bp, Artificial; identical to SEQ ID NO: 4392
  Mutations within GlyA3B4 introduced by GmGlyA3B4_T03TALE nuclease

SEQ ID NO: 5203 - DNA, 637 bp, Artificial
  Mutations within GlyA3B4 introduced by GmGlyA3B4_T03TALE nuclease
gttcatgtacggttgcagatataaacgaagcatagcttatgtatgaggtgtaacaaaattggaaacaatagccatgcaaggtgaagaatgtcaccaactcagaaacccttcttcattgacgtgtccctcactcactctcctctcttcactataaatcgccactcttcgtgttctccacttcaccaactccttcaaacttattaacactttccttagttcaatatggggaagcccttcttcactctctctctttcttccctttgcttgctactcttgtcgagtgcatgctttgctattacctccagcaagttagtgccaactcaacaacctcaacgcgttggaacccgaccaccgcgttgagtccgaaggtggtcttattgaaacatggaactctcaacaccctgagctgcaatgcgccggtgtcactgtttccaaacgcaccctcaaccgcaacggcctccacttgccatcttactcaccttatccccaaatgatcattgtcgttcaaggtgcgtaatattagtaagaagtatttatcagcttaacgtgataacaataatagtaatatgaaatatttattaaatttttataattaatctctgctagaaaatttgattaatcattttagtagaatttg

SEQ ID NO: 5204 - DNA, 656 bp, Artificial
  Mutations within GlyA3B4 introduced by GmGlyA3B4_T03TALE nuclease
gttcatgtacggttgcagatataaacgaagcatagcttatgtatgaggtgtaacaaaattggaaacaatagccatgcaaggtgaagaatgtcaccaactcagaaacccttcttcattgacgtgtccctcactcactctcctctcttcactataaatcgccactcttcgtgttctccacttcaccaactccttcaaacttattaacactttccttagttcaatatggggaagcccttcttcactctctctctttcttccctttgcttgctactcttgtcgagtgcatgctttgctattacctccagcagagtgccaactcaacaacctcaacgcgttggaacccgaccaccgcgttgagtccgaaggtggtcttattgaaacatggaactctcaacaccctgagctgcaatgcgccgtgtcactgtttccaaacgcaccctcaaccgcaacggcctccacttgccatcttactcaccttatccccaaatgatcattgtcgttcaaggtgcgtaatattagtaagaagtatttatcagcttaacgtgataacaatatagtaatatgaaatatttattaaatttttataattaatctctgctagaaaatttgattaatcattttagtagaatttgtttttctcaactaggtaaacacca

SEQ ID NO: 5205 - DNA, 642 bp, Artificial
  Mutations within GlyA3B4 introduced by GmGlyA3B4_T03TALE nuclease
gttcatgtacggttgcagatataaacgaagcatagcttatgtatgaggtgtaacaaaattggaaacaatagccatgcaaggtgaagaatgtcaccaactcagaaacccttcttcattgacgtgtccctcactcactctcctctcttcactataaatcgccactcttcgtgttctccacttcaccaactccttcaaacttattaacactttccttagttcaatatggggaagcccttcttcactctctctctttcttccctttgcttgctactcttgtcgagtgcatgctttgctattacctccagcaagtgccaactcaacaacctcaacgcgttggaacccgaccaccgcgttgagtccgaaggtggtcttattgaaacatggaactctcaacaccctgagctgcaatgcgccggtgtcactgtttccaaacgcaccctcaaccgcaacggcctccacttgccatcttactcaccttatccccaaatgatcattgtcgttcaaggtgcgtaatattagtaagaagtatttatcagcttaacgtgataacaataatagtaatatgaaatatttattaaatttttataattaatctctgctagaaaatttgattaatcattttagtagaatttgttttctcaa

SEQ ID NO: 5206 - DNA, 660 bp, Artificial
  Mutations within GlyA3B4 introduced by GmGlyA3B4_T03TALE nuclease
gttcatgtacggttgcagatataaacgaagcatagcttatgtatgaggtgtaacaaaattggaaacaatagccatgcaaggtgaagaatgtcaccaactcagaaacccttcttcattgacgtgtccctcactcactctcctctcttcactataaatcgccactcttcgtgttctccacttcaccaactccttcaaacttattaacactttccttagttcaatatggggaagcccttcttcactctctctctttcttccctttgcttgctactcttgtcgagtgcatgctttgctattacctccaagtgccaactcaacaacctcaacgcgttggaacccgaccaccgcgttgagtccgaaggtggtcttattgaaacatggaactctcaacaccctgagctgcaatgcgccggtgtcactgtttccaaacgcaccctcaaccgcaacggcctccacttgccatcttactcaccttatccccaaatgatcattgtcgttcaaggtgcgtaatattagtaagaagtatttatcagcttaacgtgataacaataatagtaatatgaaatatttattaaatttttataattaatctctgctagaaaatttgattaatcatttttagtagaatttgtttttctcaactaggtttttaaaacacca

SEQ ID NO: 5207 - DNA, 620 bp, Artificial
  Mutations within GlyA3B4 introduced by GmGlyA3B4_T03TALE nuclease
gttcatgtacggttgcagatataaacgaagcatagcttatgtatgaggtgtaacaaaattggaaacaatagccatgcaaggtgaagaatgtcaccaactcagaaacccttcttcattgacgtgtccctcactcactctcctctcttcactataaatcgccactcttcgtgttctccacttcaccaactccttcaaacttattaacactttccttagttcaatatggggaagcccttcttcactctctctctttcttccctttgcttgctactcttgtcgagtgcatgctttgctattacctccagcaagtagtgccaactcaacaacctcaacgcgttggaacccgaccaccgcgttgagtccgaaggtggtcttattgaaacatggaactctcaacaccctgagctgcaatgcgccggtgtcactgtttccaaacgcaccctcaaccgcaacggcctccacttgccatcttactcaccttatccccaaatgatcattgtcgttcaaggtgcgtaatattagtaagaagtatttatcggcttaacgtgataacaatatagtaatatgaaatatttattaaatttttataattaatctctgctagaaaatttgattaatca

SEQ ID NO: 5208 - DNA, 648 bp, Artificial
  Mutations within GlyA3B4 introduced by GmGlyA3B4_T03TALE nuclease
gttcatgtacggttgcagatataaacgaagcatagcttatgtatgaggtgtaacaaaattggaaacaatagccatgcaaggtgaagaatgtcaccaactcagaaacccttcttcattgacgtgtccctcactcactctcctctcttcactataaatcgccactcttcgtgttctccacttcaccaactccttcaaacttattaacactttccttagttcaatatggggaagcccttcttcactctctctctttcttccctttgcttgctactcttgtcgagtgcatgctttgctattacctccagcaagtacgccaactcaacaacctcaacgcgttggaacccgaccaccgcgttgagtccgaaggtggtcttattgaaacatggaactctcaacaccctgagctgcaatgcgccggtgtcactgtttccaaacgcaccctcaaccgcaacggcctccacttgccatcttactcaccttatccccaaatgatcattgtcgttcaaggtgcgtaatattagtaagagtatttatcagcttaacgtgataacaatatagtaatatgaaatatttattaaatttttataattaatctctgctagaaaatttgattaatcattttagtagaatttgtttttctcaactagg

SEQ ID NO: 5209 - DNA, 684 bp, Artificial
  Mutations within GlyA3B4 introduced by GmGlyA3B4_T03TALE nuclease
gttcatgtacggttgcagatataaacgaagcatagcttatgtatgaggtgtaacaaaattggaaacaatagccatgcaaggtgaagaatgtcaccaactcagaaacccttcttcattgacgtgtccctcactcactctcctctcttcactataaatcgccactcttcgtgttctccacttcaccaactccttcaaacttattaacactttccttagttcaatatggggaagcccttcttcactctctctctttcttccctttgcttgctactcttgtcgagtgcatgctttgctattacctccagcaagtttgccaactcacacctacaacgacgattgacccagcaccacctggcagttgcagtcccgaacggtggttgcttattgcaaaacgatgggaactccttatcaaacagaccctgagcactgcaatgcgccaggtgtcctgtttccaaacgcacccttcaaccgcaaccggcctccacttgccatcttatcctctaccttatcccccaaattgatccaattgtcgttcaaggtgcagtaatattaagttaagaagtatttattcagcttaacgtgataacaatatagtaatatgaaatatttattaaatttttataataatctctgctagaaaatttgattaatcatttttagtagaatttgtttttctcaactagg

SEQ ID NO: 5210 - DNA, 654 bp, Artificial
  Mutations within GlyA3B4 introduced by GmGlyA3B4_T03TALE nuclease
gttcatgtacggttgcagatataaacgaagcatagcttatgtatgaggtgtaacaaaattggaaacaatagccatgcaaggtgaagaatgtcaccaactcagaaacccttcttcattgacgtgtccctcactcactctcctctcttcactataaatcgccactcttcgtgttctccacttcaccaactccttcaaacttattaacactttccttagttcaatatggggaagcccttcttcactctctctctttcttccctttgcttgctactcttgtcgagtgcatgctttgctattacctccagcaagtgagtgccaactcaacaacctcaacgcgttggaacccgaccaccgcgttgagtccgaaggtggtcttattgaaacatggaactctcaacaccctgagctgcaatgcgccggtgtcactgtttccaaacgcaccctcaaccgcaacggcctccacttgccatcttactcaccttatccccaaatgatcattgtcgttcaaggtgcgtaatattagtaagaagtatttatcagcttaacgtgataacaatatagtaatatgaaatatttattaaatttttataattaatctctgctagaaaatttgattaatcattttagtagaatttgttttctcaactaggtttt

SEQ ID NO: 5211 - DNA, 646 bp, Artificial; identical to SEQ ID NO: 4907
  Mutations within GlyA3B4 introduced by GmGlyA3B4_T03TALE nuclease

SEQ ID NO: 5212 - DNA, 631 bp, Artificial
  Mutations within GlyA3B4 introduced by GmGlyA3B4_T03TALE nuclease
gttcatgtacggttgcagatataaacgaagcatagcttatgtatgaggtgtaacaaaattggaaacaatagccatgcaaggtgaagaatgtcaccaactcagaaacccttcttcattgacgtgtccctcactcactctcctctcttcactataaatcgccactcttcgtgttctccacttcaccaactccttcaaacttattaacactttccttagttcaatatggggaagcccttcttcactctctctctttcttccctttgcttgctactcttgttgagtgccaactcaacaacctcaacgcgttggaacccgaccaccgcgttgagtccgaaggtggtcttattgaaacatggaactctcaacaccctgagctgcaatgcgccggtgtcactgtttccaaacgcaccctcaaccgcaacggcctccacttgccatcttactcaccttatccccaaatgatcattgtcgttcaaggtgcgtaatattagtaagaagtatttatcagcttaacgtgataacaataatagtaatatgaaatatttattaaattttttataattaatctctgctagaaaatttgattaatcatttttagtagaatttgtttttctcaactaggttttaaaca

SEQ ID NO: 5213 - DNA, 664 bp, Artificial
  Mutations within GlyA3B4 introduced by GmGlyA3B4_T03TALE nuclease
gttcatgtacggttgcagatataaacgaagcatagcttatgtatgaggtgtaacaaaattggaaacaatagccatgcaaggtgaagaatgtcaccaactcagaaacccttcttcattgacgtgtccctcactcactctcctctcttcactataaatcgccactcttcgtgttctccacttcaccaactccttcaaacttattaacactttccttagttcaatatggggaagcccttcttcactctctctctttcttccctttgcttgctactcttgtcgagtgcatgctttgctattacctccagcaagttcgagtgccaactcaacaacctcaacgcgttggaacccgaccaccgcgttgagtccgaaggtggtcttattgaaacatggaactctcaacaccctgagctgcaatgcgccggtgtcactgtttccaaacgcaccctcaaccgcaacggcctccacttgccatcttactcaccttatccccaaatgatcattgtcgttcaaggtgcgtaatattagtaagagtatttatcagcttaacgtgataacaatatagtaatatgaaatatttattaaatttttataattaatctctgctagaaaatttgattaatcattttagtagaatttgttttctcaactaggtttttaaacacca

SEQ ID NO: 5214 - DNA, 655 bp, Artificial
  Mutations within GlyA3B4 introduced by GmGlyA3B4_T03TALE nuclease
gttcatgtacggttgcagatataaacgaagcatagcttatgtatgaggtgtaacaaaattggaaacaatagccatgcaaggtgaagaatgtcaccaactcagaaacccttcttcattgacgtgtccctcactcactctcctctcttcactataaatcgccactcttcgtgttctccacttcaccaactccttcaaacttattaacactttccttagttcaatatggggaagcccttcttcactctctctctttcttccctttgcttgctactcttgtcgagtgcatgctttgctattacctccagcaagttcaaactcaacaacctcaacgcgttggaacccgaccaccgcgttgagtccgaaggtggtcttattgaaacatggaactctcaacaccctgagctgcaatgcgccggtgtcactgtttccaaacgcaccctcaaccgcaacggcctccacttgccatcttactcaccttatccccaaatgatcattgtcgttcaaggtgcgtaatattagtaagaagtatttatcagcttaacgtgataacaataatagtaatatgaaatatttattaaatttttataattaatctctgctagaaaatttgattaatcattttagtagaatttgttttctcaactaggttttaaaa

SEQ ID NO: 5215 - DNA, 599 bp, Artificial; identical to SEQ ID NO: 2087
  Mutations within GlyA3B4 introduced by GmGlyA3B4_T03TALE nuclease

SEQ ID NO: 5216 - DNA, 543 bp, Artificial
  Mutations within GlyA3B4 introduced by GmGlyA3B4_T03TALE nuclease
gttcatgtacggttgcagatataaacgaagcatagcttatgtatgaggtgtaacaaaattggaaacaatagccatgcaaggtgaagaatgtcaccaactcagaaacccttcttcattgacgtgtccctcactcactctcctctcttcactataaatcgccactcttcgtgttctccacttcaccaactccttcaaacttattaacactttccttagttcaatatggggaagcccttcttcactctctctctttcttccctttgcttgctactcttgtcgagtgcatgctttgcttgaattttatttatttcccggtgtcactgtttccaaacgcaccctcaaccgcaacggcctccacttgccatcttactcaccttatccccaaatgatcattgtcgttcaaggtgcgtaatattagtaagaagtatttatcagcttaacgtgataacaataatagtaatatgaaatatttattaaattttttataattaatctctgctagaaaatttgattaatcatttttagtagaatttgttttttctc

SEQ ID NO: 5217 - DNA, 652 bp, Artificial
  Mutations within GlyA3B4 introduced by GmGlyA3B4_T03TALE nuclease
gttcatgtacggttgcagatataaacgaagcatagcttatgtatgaggtgtaacaaaattggaaacaatagccatgcaaggtgaagaatgtcaccaactcagaaacccttcttcattgacgtgtccctcactcactctcctctcttcactataaatcgccactcttcgtgttctccacttcaccaactccttcaaacttattaacactttccttagttcaatatggggaagcccttcttcactctctctctttcttccctttgcttgctactcttgtcgagtgcatgctttgctattacctccaagtgccaactcaacaacctcaacgcgttggaacccgaccaccgcgttgagtccgaaggtggtcttattgaaacatggaactctcaacaccctgagctgcaatgcgccggtgtcactgtttccaaacgcaccctcaaccgcaacggcctccacttgccatcttactcaccttatccccaaatgatcattgtcgttcaaggtgcgtaatattagtaagaagtatttatcagcttaacgtgataacaataatagtaatatgaaatatttattaaatttttataattaatctctgctagaaaatttgattaatcattttagtagaatttgttttctcaactaggttttaaaa

SEQ ID NO: 5218 - DNA, 645 bp, Artificial
  Mutations within GlyA3B4 introduced by GmGlyA3B4_T03TALE nuclease
gttcatgtacggttgcagatataaacgaagcatagcttatgtatgaggtgtaacaaaattggaaacaatagccatgcaaggtgaagaatgtcaccaactcagaaacccttcttcattgacgtgtccctcactcactctcctctcttcactataaatcgccactcttcgtgttctccacttcaccaactccttcaaacttattaacactttccttagttcaatatggggaagcccttcttcactctctctctttcttccctttgcttgctactcttgtcgagtgcatgctttgctattacctccagcaagttcagtgccaactcaacaacctcaacgcgttggaaccgaccaccgcgttgagtccgaaggtggtcttattgaaacatggaactctcaacaccctgagctgcaatgcgccggtgtcactgtttccaaacgcaccctcaaccgcaacggcctccacttgccatcttactcaccttatccccaaatgatcattgtcgttcaaggtgcgtaatattagtaagaagtatttatcagcttaacgtgataacaatatagtaatatgaaatatttattaaatttttataattaatctctgctagaaaatttgattaatcattttagtagaatttgttttctcaa

SEQ ID NO: 5219 - DNA, 669 bp, Artificial
  Mutations within GlyA3B4 introduced by GmGlyA3B4_T03TALE nuclease
gttcatgtacggttgcagatataaacgaagcatagcttatgtatgaggtgtaacaaaattggaaacaatagccatgcaaggtgaagaatgtcaccaactcagaaacccttcttcattgacgtgtccctcactcactctcctctcttcactataaatcgccactcttcgtgttctccacttcaccaactccttcaaacttattaacactttccttagttcaatatggggaagcccttcttcactctctctctttcttccctttgcttgctactcttgtcgagtgcatgctttgctattacctccagcaagttcgagtgccaactcaacaacctcaacgcgttggaacccgaccaccgcgttgagtccgaaggtggtcttattgaaacatggaactctcaacaccctgagctgcaatgcgccggtgtcactgtttccaaacgcaccctcaaccgcaacggcctccacttgccatcttactcaccttatccccaaatgatcattgtcgttcaaggtgcgtaatattagtaagaagtatttatcagcttaacgtgataacaatatagtaatatgaaatatttattaaatttttataattaatctctgctagaaaatttgattaatcattttagtagaatttgtttttctcaactaggtttttaaaacaccaca

SEQ ID NO: 5220 - DNA, 665 bp, Artificial; identical to SEQ ID NO: 4810
  Mutations within GlyA3B4 introduced by GmGlyA3B4_T03TALE nuclease

SEQ ID NO: 5221 - DNA, 640 bp, Artificial
  Mutations within GlyA3B4 introduced by GmGlyA3B4_T03TALE nuclease
gttcatgtacggttgcagatataaacgaagcatagcttatgtatgaggtgtaacaaaattggaaacaatagccatgcaaggtgaagaatgtcaccaactcagaaacccttcttcattgacgtgtccctcactcactctcctctcttcactataaatcgccactcttcgtgttctccacttcaccaactccttcaaacttattaacactttccttagttcaatatggggaagcccttcttcactctctctctttcttccctttgcttgctactcttgtcgagtgcatgctttgctattacctccagcaagttcaacgcgttggaacccgaccaccgcgttgagtccgaaggtggtcttattgaaacatggaactctcaacaccctgagctgcaatgcgccggtgtcactgtttccaaacgcaccctcaaccgcaacggcctccacttgccatcttactcaccttatccccaaatgatcattgtcgttcaaggtgcgtaatattagtaagaagtatttatcagcttaacgtgataacaataatagtaatatgaaatatttattaaattttttataattaatctctgctagaaaatttgattaatcatttttagtagaatttgttttttctcaactaggtttt

SEQ ID NO: 5222 - DNA, 650 bp, Artificial
  Mutations within GlyA3B4 introduced by GmGlyA3B4_T03TALE nuclease
gttcatgtacggttgcagatataaacgaagcatagcttatgtatgaggtgtaacaaaattggaaacaatagccatgcaaggtgaagaatgtcaccaactcagaaacccttcttcattgacgtgtccctcactcactctcctctcttcactataaatcgccactcttcgtgttctccacttcaccaactccttcaaacttattaacactttccttagttcaatatggggaagcccttcttcactctctctctttcttccctttgcttgctactcttgtcgagtgcatgctttgctattacctccagcaagttccaactcaacaacctcaacgcgttggaacccgaccaccgcgttgagtccgaaggtggtcttattgaaacatggaactctcaacaccctgagctgcaatgcgccggtgtcactgtttccaaacgcaccctcaaccgcaacggcctccacttgccatcttactcaccttatccccaaatgatcattgtcgttcaaggtgcgtaatattagtaagaagtatttatcagcttaacgtgataacaatatagtaatatgaaatatttattaaatttttataattaatctctgctagaaaatttgattaatcattttagtagaatttgttttctcaactaggtttt

SEQ ID NO: 5223 - DNA, 713 bp, Artificial
  Mutations within GlyA3B4 introduced by GmGlyA3B4_T03TALE nuclease
gttcatgtacggttgcagatataaacgaagcatagcttatgtatgaggtgtaacaaaattggaaacaatagccatgcaaggtgaagaatgtcaccaactcagaaacccttcttcattgacgtgtccctcactcactctcctctcttcactataaatcgccactcttcgtgttctccacttcaccaactccttcaaacttattaacactttccttagttcaatatggggaagcccttcttcactctctctctttcttccctttgcttgctactcttgtcgagtgcatgctttgctattacctccagcaaggtcaagccgtgggcctggcacagcaccggcaacagccgctggaccgtctccagcgcctgcttgccaccgagtgccaactcaacaacctcaacgcgttggaacccgaccaccgcgttgagtccgaaggtggtcttattgaaacatggaactctcaacaccctgagctgcaatgcgccggtgtcactgtttccaaacgcaccctcaaccgcaacggcctccacttgccatcttactcaccttatcccaaatgatcattgtcgttcaaggtgcgtaatattagtaagaagtatttatcagcttaacgtgataacaataatagtaatatgaaatatttattaaattttttataattaatctctgctagaaaaatttgattaatcatttttagtagaatttgtttttct

SEQ ID NO: 5224 - DNA, 526 bp, Artificial; identical to SEQ ID NO: 5066
  Mutations within GlyA3B4 introduced by GmGlyA3B4_T03TALE nuclease

SEQ ID NO: 5225 - DNA, 661 bp, Artificial
  Mutations within GlyA3B4 introduced by GmGlyA3B4_T03TALE nuclease
gttcatgtacggttgcagatataaacgaagcatagcttatgtatgaggtgtaacaaaattggaaacaatagccatgcaaggtgaagaatgtcaccaactcagaaacccttcttcattgacgtgtccctcactcactctcctctcttcactataaatcgccactcttcgtgttctccacttcaccaactccttcaaacttattaacactttccttagttcaatatggggaagcccttcttcactctctctctttcttccctttgcttgctactcttgtcgagtgcatgctttgctattacctccagcaagttgccaactcaacaacctcaacgcgttggaacccgaccaccgcgttgagtccgaaggtggtcttattgaaacatggaactctcaacaccctgagctgcaatgcgccggtgtcactgtttccaaacgcaccctcaaccgcaacggcctccacttgccatcttactcaccttatccccaaatgatcattgtcgttcaaggtgcgtaatattagtaagaagtatttatcagcttaacgtgataacaatatagtaatatgaaatatttattaaatttttataattaatctctgctagaaaatttgattaatcattttagtagaatttgttttctcaactaggtttttaaaacacca

SEQ ID NO: 5226 - DNA, 534 bp, Artificial
  Mutations within GlyA3B4 introduced by GmGlyA3B4_T03TALE nuclease
  misc_feature (486): n is a or c or t or g
gttcatgtacggttgcagatataaacgaagcatagcttatgtatgaggtgtaacaaaattggaaacaatagccatgcaaggtgaagaatgtcaccaactcagaaacccttcttcattgacgtgtccctcactcactctcctctcttcactataaatcgccactcttcgtgttctccacttcaccaactccttcaaacttattaacactttccttagttcaatatggggaagcccttcttcactctctctctttcttcccgaccaccgcgttgagtccgaaggtggtcttattgaaacatggactctcaacaccctgagctgcaatgcgccggtgtcactgtttccaaacgcaccctcaaccgcaacggcctccacttgccatcttactcaccttatccccaaatgatcattgtcgttcaaggtgcgtaatattagtaagaagtatttatcagcttaacgtgataacaataatagtaatatgaaatntttattaaattttttatatcaatctctgctagaaaatttgattaatca

SEQ ID NO: 5227 - DNA, 631 bp, Artificial
  Mutations within GlyA3B4 introduced by GmGlyA3B4_T03TALE nuclease
gttcatgtacggttgcagatataaacgaagcatagcttatgtatgaggtgtaacaaaattggaaacaatagccatgcaaggtgaagaatgtcaccaactcagaaacccttcttcattgacgtgtccctcactcactctcctctcttcactataaatcgccactcttcgtgttctccacttcaccaactccttcaaacttattaacactttccttagttcaaacttattaacactttccttagttcaatatgggggaagcccttcttcactctctctctttcttccctttgcttgctactcttgtcgagtgcatgctttgctattacctccagcaagtgtgccaactcaacaacctcaacgcgttggaacccgaccaccgcgttgagtccgaaggtggtcttattgaaacatggaactctcaacaccctgagctgcaatgcgccggtgtcactgtttccaaacgcaccctcaaccgcaacggcctccacttgccatcttactcaccttatccccaaatgatcattgtcgttcaaggtcgcgtaatattagtaagaagtatttatcagcttaacgtgataacaataatagtaatatgaaatatttattaaatttttataattaatctctgcta

SEQ ID NO: 5228 - DNA, 663 bp, Artificial; identical to SEQ ID NO: 4975
  Mutations within GlyA3B4 introduced by GmGlyA3B4_T03TALE nuclease

SEQ ID NO: 5229 - DNA, 635 bp, Artificial
  Mutations within GlyA3B4 introduced by GmGlyA3B4_T03TALE nuclease
gttcatgtacggttgcagatataaacgaagcatagcttatgtatgaggtgtaacaaaattggaaacaatagccatgcaaggtgaagaatgtcaccaactcagaaacccttcttcattgacgtgtccctcactcactctcctctcttcactataaatcgccactcttcgtgttctccacttcaccaactccttcaaacttattaacactttccttagttcaatatggggaagcccttcttcactctctctctttcttccctttgcttgctactcttgtcgagtgcatgagtgccaactcaacaacctcaacgcgttggaacccgaccaccgcgttgagtccgaaggtggtcttattgaaacatggaactctcaacaccctgagctgcaatgcgccggtgtcactgtttccaaacgcaccctcaaccgcaacggcctccacttgccatcttactcaccttatccccaaatgatcattgtcgttcaaggtgcgtaatattagtaagaagtatttatcagcttaacgtgataacaataatagtaatatgaaatatttattaaattttttataattaatctctgctagaaaatttgattaatcatttttagtagaatttgttttttctcaactaggtttt

SEQ ID NO: 5230 - DNA, 650 bp, Artificial
  Mutations within GlyA3B4 introduced by GmGlyA3B4_T03TALE nuclease
  misc_feature (529): n is a or c or t or g
gttcatgtacggttgcagatataaacgaagcatagcttatgtatgaggtgtaacaaaattggaaacaatagccatgcaaggtgaagaatgtcaccaactcagaaacccttcttcattgacgtgtccctcactcactctcctctcttcactataaatcgccactcttcgtgttctccacttcaccaactccttcaaacttattaacactttccttagttcaatatggggaagcccttcttcactctctctctttcttccctttgcttgctactcttgtcgagtgcatgctttgctattacctccagcaacgagtgccaactcaacaacctcaacgcgttggaacccgaccaccgcgttgagtccgaaggtggtcttattgaaacatggaactctcaacaccctgagctgcaatgcgccggtgtcactgtttccaaacgcaccctcaaccgcaacggcctccacttgccatcttactcaccttatccccaaatgatcattgtcgttcaaggtgcgtaatattagtaagagnatttatcagcttaacgtgataacaataatagtaatatgaaatatttattaaatttttataattaatctctgctagaaaatttgattaatcattttagtagaatttgtttttctcaactagg

SEQ ID NO: 5231 - DNA, 632 bp, Artificial
  Mutations within GlyA3B4 introduced by GmGlyA3B4_T03TALE nuclease
gttcatgtacggttgcagatataaacgaagcatagcttatgtatgaggtgtaacaaaattggaaacaatagccatgcaaggtgaagaatgtcaccaactcagaaacccttcttcattgacgtgtccctcactcactctcctctcttcactataaatcgccactcttcgtgttctccacttcaccaactccttcaaacttattaacactttccttagttcaatatggggaagcccttcttcactctctctctttcttccctttgcttgctactcttgtcgagtgcatgctttgctattacctccagcgagtgccaactcaacaacctcaacgcgttggaacccgaccaccgcgttgagtccgaaggtggtcttattgaaacatggaactctcaacaccctgagctgcaatgcgccggtgtcactgtttccaaacgcaccctcaaccgcaacggcctcacttgccatcttactcaccttatccccaatgaatcattgtcgttcaaggtgcgtaatattagtaagaagtatttatcagcttaacgtgataacaataatagtaatatgaaatatttattaaatttttataattaatctctgctagaaaatttgattaatcattttagtagaatttg

SEQ ID NO: 5232 - DNA, 621 bp, Artificial
  Mutations within GlyA3B4 introduced by GmGlyA3B4_T03TALE nuclease
gttcatgtacggttgcagatataaacgaagcatagcttatgtatgaggtgtaacaaaattggaaacaatagccatgcaaggtgaagaatgtcaccaactcagaaacccttcttcattgacgtgtccctcactcactctcctctcttcactataaatcgccactcttcgtgttctccacttcaccaactccttcaaacttattaacactttccttagttcaatatggggaagcccttcttcactctctctctttcttccctttgcttgctactcttgtcgagtgcatgctttgctattacctccagcaagttctgccaactcaacaacctcaacgcgttggaacccgaccaccgcgttgagtccgaaggtggtcttattgaaacatggaactctcaacaccctgagctgcaatgcgccggtgtcactgtttccaaacgcaccctcaaccgcaacggcctccacttgccatcttactcaccttatccccaaatgatcattgtcgttcaaggtgcgtaatattagtaagaagtatttatcagcttaacgtgataacaataatagtaatatgaaatatttattaaatttttataattaatctctgctagaaaatttgattaatca

SEQ ID NO: 5233 - DNA, 520 bp, Artificial; identical to SEQ ID NO: 5176
  Mutations within GlyA3B4 introduced by GmGlyA3B4_T03TALE nuclease

SEQ ID NO: 5234 - DNA, 645 bp, Artificial; identical to SEQ ID NO: 5013
  Mutations within GlyA3B4 introduced by GmGlyA3B4_T03TALE nuclease

SEQ ID NO: 5235 - DNA, 615 bp, Artificial
  Mutations within GlyA3B4 introduced by GmGlyA3B4_T03TALE nuclease
gttcatgtacggttgcagatataaacgaagcatagcttatgtatgaggtgtaacaaaattggaaacaatagccatgcaaggtgaagaatgtcaccaactcagaaacccttcttcattgacgtgtccctcactcactctcctctcttcactataaatcgccactcttcgtgttctccacttcaccaactccttcaaacttattaacactttccttagttcaatatggggaagcccttcttcactctctctctttcttccctttgcttgctactcttgtcgagtgccaactcaacaacctcaacgcgttggaacccgaccaccgcgttgagtccgaaggtggtcttattgaaacatggaactctcaacaccctgagctgcaatgcgccggtgtcactgtttccaaacgcaccctcaaccgcaacggcctccacttgccatcttactcaccttatccccaaatgatcattgtcgttcaaggtgcgtaatattagtaagaagtatttatcagcttaacgtgataacaataatagtaatatgaaatatttattaattttttataattaatctctgctagaaatttgattaatcatttttagtagaatttgtttttctcaa

SEQ ID NO: 5236 - DNA, 657 bp, Artificial
  Mutations within GlyA3B4 introduced by GmGlyA3B4_T03TALE nuclease
  misc_feature (532): n is a or c or t or g
gttcatgtacggttgcagatataaacgaagcatagcttatgtatgaggtgtaacaaaattggaaacaatagccatgcaaggtgaagaatgtcaccaactcagaaacccttcttcattgacgtgtccctcactcactctcctctcttcactataaatcgccactcttcgtgttctccacttcaccaactccttcaaacttattaacactttccttagttcaatatggggaagcccttcttcactctctctctttcttccctttgcttgctactcttgtcgagtgcatgctttgctattacctccagcaagttcgagtgccaactcaacaacctcaacgcgttggaacccgaccaccgcgttgagtccgaaggtggtcttattgaaacatggaactctcaacaccctgagctgcaatgcgccggtgtcactgtttccaaacgcaccctcaaccgcaacggcctccacttgccatcttactcaccttatccccaaatgatcattgtcgttcaaggtgcgtaatattagtaagagnatttatcagcttaacgtgataacaataatagtaatatgaaatatttattaaatttttataattaatctctgctagaaaatttgattaatcattttagtagaatttgtttttctcaactaggtttt

SEQ ID NO: 5237 - DNA, 653 bp, Artificial
  Mutations within GlyA3B4 introduced by GmGlyA3B4_T03TALE nuclease
gttcatgtacggttgcagatataaacgaagcatagcttatgtatgaggtgtaacaaaattggaaacaatagccatgcaaggtgaagaatgtcaccaactcagaaacccttcttcattgacgtgtccctcactcactctcctctcttcactataaatcgccactcttcgtgttctccacttcaccaactccttcaaacttattaacactttccttagttcaatatggggaagcccttcttcactctctctctttcttccctttgcttgctactcttgtcgagtgcatgctttgctattacctccagcaaggagtgccaactcaacaacctcaacgcgttggaacccgaccaccgcgttgagtccgaaggtggtcttattgaacatggaactctcaacaccctgagctgcaatgcgccggtgtcactgtttccaaacgcaccctcaaccgcaacggcctccacttgccatcttactcaccttatccccaaatgatcattgtcgttcaaggtgcgtaatattagtaagaagtatttatcagcttaacgtgataacaataatagtaatatgaaatatttattaaatttttataattaatctctgctagaaaatttgattaatcattttagtagaatttgttttctcaactaggtttt

SEQ ID NO: 5238 - DNA, 494 bp, Artificial; identical to SEQ ID NO: 4880
  Mutations within GlyA3B4 introduced by GmGlyA3B4_T03TALE nuclease

SEQ ID NO: 5239 - DNA, 564 bp, Artificial
  Mutations within GlyA3B4 introduced by GmGlyA3B4_T03TALE nuclease
gttcatgtacggttgcagatataaacgaagcatagcttatgtatgaggtgtaacaaaattggaaacaatagccatgcaaggtgaagaatgtcaccaactcagaaacccttcttcattgacgtgtccctcactcactctcctctcttcactataaatcgccactcttcgtgttctccacttcaccaactccttcaaacttattaacactttccttagttcaatatggggaagcccttcttcactctctccctttgcttgctactcttgtcgagtgccaactcaacaacctcaacgcgttggaacccgaccaccgcgttgagtccgaaggtggtcttattgaaacatggaactctcaacaccctgagctgcaatgcgccggtgtcactgtttccaaacgcaccctcaaccgcaacggcctccacttgccatcttactcaccttatccccaaatgatcattgtcgttcaaggtgcgtaatattagtaagaagtatttatcagcttaacgtgataacaataatagtaatatgaaatatttattaatttttataattaatctctgctag

SEQ ID NO: 5240 - DNA, 483 bp, Artificial
  Mutations within GlyA3B4 introduced by GmGlyA3B4_T03TALE nuclease
gttcatgtacggttgcagatataaacgaagcatagcttatgtatgaggtgtaacaaaattggaaacaatagccatgcaaggtgaagaatgtcaccaactcagaaacccttcttcattgacgtgtccctcactcactctcctctcttcactataaatcgccactcttcgtgttctccacttcaccaactccttcaaacttattaacactttccttagttcaatatggggaagcccttcttcactctctctctttcttccctcaaccgcaacggcctccacttgccatcttactcaccttatccccaaatgatcattgtcgttcaaggtgcgtaatattagtaagaagtatttatcagcttaacgtgataacaataatagtaatatgaaatatttattaaattttttataattaatctctgctagaaaatttgattaatcatttttagtagaatttgtttttctcaactaggtttttaaacacca

SEQ ID NO: 5241 - DNA, 647 bp, Artificial; identical to SEQ ID NO: 5103
  Mutations within GlyA3B4 introduced by GmGlyA3B4_T03TALE nuclease

SEQ ID NO: 5242 - DNA, 648 bp, Artificial
  Mutations within GlyA3B4 introduced by GmGlyA3B4_T03TALE nuclease
gttcatgtacggttgcagatataaacgaagcatagcttatgtatgaggtgtaacaaaattggaaacaatagccatgcaaggtgaagaatgtcaccaactcagaaacccttcttcattgacgtgtccctcactcactctcctctcttcactataaatcgccactcttcgtgttctccacttcaccaactccttcaaacttattaacactttccttagttcaatatggggaagcccttcttcactctctctctttcttccctttgcttgctactcttgtcgagtgcatgctttgctattacctccagcaacaactcaacaacctcaacgcgttggaacccgaccaccgcgttgagtccgaaggtggtcttattgaaacatggaactctcaacaccctgagctgcaatgcgccggtgtcactgtttccaaacgcaccctcaaccgcaacggcctccacttgccatcttactcaccttatcccaactgaatcattgtcgttcaaggtgcgtaatattagtaagaagtatttatcagcttaacgtgataacaataatagtaatatgaaatatttattaaatttttataattaatctctgctagaaaatttgattaatcattttagtagaatttgtttttctcaactaggtttt

SEQ ID NO: 5243 - DNA, 661 bp, Artificial
  Mutations within GlyA3B4 introduced by GmGlyA3B4_T03TALE nuclease
gttcatgtacggttgcagatataaacgaagcatagcttatgtatgaggtgtaacaaaattggaaacaatagccatgcaaggtgaagaatgtcaccaactcagaaacccttcttcattgacgtgtccctcactcactctcctctcttcactataaatcgccactcttcgtgttctccacttcaccaactccttcaaacttattaacactttccttagttcaatatggggaagcccttcttcactctctctctttcttccctttgcttgctactcttgtcgagtgcatgctttgctattacctccagcaagtttgcactactaacaacctcaacgcgttggaacccgaccaccgcgttgagtccgaaggtggtcttattgaaacatggaactccacaccactgcgctgcaatgcgccggtgtcactgtttccaaacgcaccctcaaccgcaacggcctccacttgccatcttactcaccttatccccaaatgatcattgtcgttcaaggtgcgtaatattagtaagaagtatttatcagcttaacgtgataacaataatagtaatatgaaatatttattaaatttttataattaatctctgctagaaaatttgattaatcattttagtagaatttgttttctcaactaggttttaaaacacca

SEQ ID NO: 5244 - DNA, 638 bp, Artificial; identical to SEQ ID NO: 5119
  Mutations within GlyA3B4 introduced by GmGlyA3B4_T03TALE nuclease

SEQ ID NO: 5245 - DNA, 656 bp, Artificial
  Mutations within GlyA3B4 introduced by GmGlyA3B4_T03TALE nuclease
gttcatgtacggttgcagatataaacgaagcatagcttatgtatgaggtgtaacaaaattggaaacaatagccatgcaaggtgaagaatgtcaccaactcagaaacccttcttcattgacgtgtccctcactcactctcctctcttcactataaatcgccactcttcgtgttctccacttcaccaactccttcaaacttattaacactttccttagttcaatatggggaagcccttcttcactctctctctttcttccctttgcttgctactcttgtcgagtgcatgctttgctattacctccagcaagttcgagtgccaactcaacaacctcaacgcgttggaacccgaccaccgcgttgagtccgaaggtggtcttattgaaacatggaactctcaacaccctgagctgcaatgcgccggtgtcactgtttccaaacgcaccctcaaccgcaacggcctccacttgccatcttactcaccttatccccaaatgatcattgtcgttcaaggtgcgtaatattagtaagagtatttatcagcttaacgtgataacaataatagtaatatgaaatatttattaaatttttataattaatctctgctagaaaatttgattaatcattttagtagaatttgttttctcaactaggtttt

SEQ ID NO: 5246 - DNA, 620 bp, Artificial
  Mutations within GlyA3B4 introduced by GmGlyA3B4_T03TALE nuclease
gttcatgtacggttgcagatataaacgaagcatagcttatgtatgaggtgtaacaaaattggaaacaatagccatgcaaggtgaagaatgtcaccaactcagaaacccttcttcattgacgtgtccctcactcactctcctctcttcactataaatcgccactcttcgtgttctccacttcaccaactccttcaaacttattaacactttccttagttcaatatggggaagcccttcttcactctctctctttcttccctttgcttgctactcttgtcgagtgcatgctttgctattacctccagcaagagtgccaactcaacaacctcaacgcgttggaacccgaccaccgcgttgagtccgaaggtggtcttattgaaacatggaactctcaacaccctgagctgcaatgcgccggtgtcactgtttccaaacgcaccctcaaccgcaacggcctccacttgccatcttactcaccttatccccaaatgatcattgtcgttcaaggtgcgtaatattagtaagaagtatttatcagcttaacgtgataacaataatagtaatatgaaatatttattaaatttttataattaatctctgctagaaaatttgattaatca

SEQ ID NO: 5247 - DNA, 642 bp, Artificial
  Mutations within GlyA3B4 introduced by GmGlyA3B4_T03TALE nuclease
gttcatgtacggttgcagatataaacgaagcatagcttatgtatgaggtgtaacaaaattggaaacaatagccatgcaaggtgaagaatgtcaccaactcagaaacccttcttcattgacgtgtccctcactcactctcctctcttcactataaatcgccactcttcgtgttctccacttcaccaactccttcaaacttattaacactttccttagttcaatatggggaagcccttcttcactctctctctttcttccctttgcttgctactcttgtcgagtgcatgctttgctattacctccagcaagtgccaactcaacaacctcaacgcgttggaacccgaccaccgcgttgagtccgaaggtggtcttattgaacatggaactctcaacaccctgagctgcaatgcgccggtgtcactgtttccaaacgcaccctcaaccgcaacggcctccacttgccatcttactcaccttatccccaaatgatcattgtcgttcaaggtgcgtaatattagtaagaagtatttatcagcttaacgtgataacaataatagtaatatgaaatatttattaaatttttataattaatctctgctagaaaatttgattaatcattttagtagaatttgttttctcaac

SEQ ID NO: 5248 - DNA, 620 bp, Artificial
  Mutations within GlyA3B4 introduced by GmGlyA3B4_T03TALE nuclease
gttcatgtacggttgcagatataaacgaagcatagcttatgtatgaggtgtaacaaaattggaaacaatagccatgcaaggtgaagaatgtcaccaactcagaaacccttcttcattgacgtgtccctcactcactctcctctcttcactataaatcgccactcttcgtgttctccacttcaccaactccttcaaacttattaacactttccttagttcaatatggggaagcccttcttcactctctctctttcttccctttgcttgctactcttgtcgagtgcatgctttgctattacctccagcaaagagtgccaactcaacaacctcaacgcgttggaacccgaccaccgcgttgagtccgaaggtggtcttattgaaacatggaactctcaacaccctgagctgcaatgcgccggtgtcactgtttccaaacgcaccctcaaccgcaacggcctccacttgccatcttactcaccttatccccaaatgatcattgtcgttcaaggtgcgtaatattagtaagaagtatttatcagcttaacgtgataacaatatagtaatatgaaatatttattaaatttttataattaatctctgctagaaaatttgattaatca

SEQ ID NO: 5249 - DNA, 643 bp, Artificial
  Mutations within GlyA3B4 introduced by GmGlyA3B4_T03TALE nuclease
gttcatgtacggttgcagatataaacgaagcatagcttatgtatgaggtgtaacaaaattggaaacaatagccatgcaaggtgaagaatgtcaccaactcagaaacccttcttcattgacgtgtccctcactcactctcctctcttcactataaatcgccactcttcgtgttctccacttcaccaactccttcaaacttattaacactttccttagttcaatatggggaagcccttcttcactctctctctttcttccctttgcttgctactcttgtcgagtgcatgctttgctattacctagtgccaactcaacaacctcaacgcgttggaacccgaccaccgcgttgagtccgaaggtggtcttattgaaacatggaactctcaacaccctgagctgcaatgcgccggtgtcactgtttccaaacgcaccctcaaccgcaacggcctccacttgccatcttactcaccttatccccaaatgatcattgtcgttcaaggtgcgtaatattagtaagaagtatttatcagcttaacgtgataacaataatagtaatatgaaatatttattaaatttttataattaatctctgctagaaaatttgattaatcatttttagtagaatttgtttttctcaactagg

SEQ ID NO: 5250 - DNA, 638 bp, Artificial; identical to SEQ ID NO: 5184
  Mutations within GlyA3B4 introduced by GmGlyA3B4_T03TALE nuclease
  misc_feature (532): n is a or c or t or g

SEQ ID NO: 5251 - DNA, 640 bp, Artificial
  Mutations within GlyA3B4 introduced by GmGlyA3B4_T03TALE nuclease
gttcatgtacggttgcagatataaacgaagcatagcttatgtatgaggtgtaacaaaattggaaacaatagccatgcaaggtgaagaatgtcaccaactcagaaacccttcttcattgacgtgtccctcactcactctcctctcttcactataaatcgccactcttcgtgttctccacttcaccaactccttcaaacttattaacactttccttagttcaatatggggaagcccttcttcactctctctctttcttccctttgcttgctactcttgtcgagtgcatgctttgctattacctccagcaagttcaaagtgccaactcaacaacctcaacgcgttggaacccgaccaccgcgttgagtccgaaggtggtcttattgaaacatggaactctcaacaccctgagctgcaatgcgccggtgtcactgtttccaaacgcaccctcaaccgcaacggcctccacttgccatcttactcaccttatccccaaatgatcattgtcgttcaaggtgcgtaatattagtaagaagtatttatcagcttaacgtgataacaataatagtaatatgaaatatttattaaatttttataattaatctctgctagaaaatttgattaatcattttagtagaatttg

SEQ ID NO: 5252 - DNA, 666 bp, Artificial
  Mutations within GlyA3B4 introduced by GmGlyA3B4_T03TALE nuclease
gttcatgtacggttgcagatataaacgaagcatagcttatgtatgaggtgtaacaaaattggaaacaatagccatgcaaggtgaagaatgtcaccaactcagaaacccttcttcattgacgtgtccctcactcactctcctctcttcactataaatcgccactcttcgtgttctccacttcaccaactccttcaaacttattaacactttccttagttcaatatggggaagcccttcttcactctctctctttcttccctttgcttgctactcttgtcgagtgcatgctttgctattacctccagcaagttagtgccaactcaacaacctcaacgcgttggaacccgaccaccgcgttgagtccgaaggtggtcttattgaaacatggaactctcaacaccctgagctgcaatgcgccggtgtcactgtttccaaacgcaccctcaaccgcaacggcctccacttgccatcttactcaccttatccccaaatgatcattgtcgttcaaggtgcgtaatattagtaagaagtatttatcagcttaacgtgataacaataatagtaatatgaaatatttattaaatttttataattaatctctgctagaaaatttgattaatcattttagtagaatttgtttttctcaactaggtttttaaaacacca

SEQ ID NO: 5253 - DNA, 651 bp, Artificial
  Mutations within GlyA3B4 introduced by GmGlyA3B4_T03TALE nuclease
gttcatgtacggttgcagatataaacgaagcatagcttatgtatgaggtgtaacaaaattggaaacaatagccatgcaaggtgaagaatgtcaccaactcagaaacccttcttcattgacgtgtccctcactcactctcctctcttcactataaatcgccactcttcgtgttctccacttcaccaactccttcaaacttattaacactttccttagttcaatatggggaagcccttcttcactctctctctttcttccctttgcttgctactcttgtcgagtgcatgctttgctattacctcccgagtgccaactcaacaacctcaacgcgttggaacccgaccaccgcgttgagtccgaaggtggtcttattgaaacatggaactctcaacaccctgagctgcaatgcgccggtgtcactgtttccaaacgcaccctcaaccgcaacggcctccacttgccatcttactcaccttatccccaaatgatcattgtcgttcaaggtgcgtaatattagtaagaagtatttatcagcttaacgtgataacaatatagtaatatgaaatatttattaaatttttataattaatctctgctagaaaatttgattaatcattttagtagaatttgttttctcaactaggttttaaa

SEQ ID NO: 5254 - DNA, 645 bp, Artificial
  Mutations within GlyA3B4 introduced by GmGlyA3B4_T03TALE nuclease
gttcatgtacggttgcagatataaacgaagcatagcttatgtatgaggtgtaacaaaattggaaacaatagccatgcaaggtgaagaatgtcaccaactcagaaacccttcttcattgacgtgtccctcactcactctcctctcttcactataaatcgccactcttcgtgttctccacttcaccaactccttcaaacttattaacactttccttagttcaatatggggaagcccttcttcactctctctctttcttccctttgcttgctactcttgtcgagtgcatgctttgctattacctccagcaagttcaacaacctcaacgcgttggaacccgaccaccgcgttgagtccgaaggtggtcttattgaaacatggaactctcaacaccctgagctgcaatgcgccggtgtcactgtttccaaacgcaccctcaaccgcaacggcctccacttgccatcttactcaccttatccccaaatgatcattgtcgttcaaggtgcgtaatattagtaagaagtatttatcagctttaacgtgataacaataatagtaatatgaaatatttattaaattttttataattaatctctgctagaaaatttgattaatcatttttagtagaatttgtttttctcaactagg

SEQ ID NO: 5255 - DNA, 635 bp, Artificial
  Mutations within GlyA3B4 introduced by GmGlyA3B4_T03TALE nuclease
gttcatgtacggttgcagatataaacgaagcatagcttatgtatgaggtgtaacaaaattggaaacaatagccatgcaaggtgaagaatgtcaccaactcagaaacccttcttcattgacgtgtccctcactcactctcctctcttcactataaatccgccactcttcgtgttctccacttcaccaactccttcaaacttattaacactttccttagttcaatatggggaagcccttcttcactctctctctttcttccctttgcttgctactcttgtcgagtgcatgctttgctattacctccagcaagagtgccaactcaacaacctcaacgcgttggaacccgaccaccgcgttgagtccgaaggtggtcttattgaaacatggaactctcaacaccctgagctgcaatgcgccggtgtcactgtttccaaacgcaccctcaaccgcaacggcctcccacttgccatcttactcaccttatccccaaatgatcattgtcgttcaaggtgcgtaatattagtaagaagtatttatcagcttaacgtgatacaatatagtaatatgaaatatttattaaatttttataattaatctctgctagaaaatttgattaatcattttagtagaatttg

SEQ ID NO: 5256 - DNA, 658 bp, Artificial
  Mutations within GlyA3B4 introduced by GmGlyA3B4_T03TALE nuclease
gttcatgtacggttgcagatataaacgaagcatagcttatgtatgaggtgtaacaaaattggaaacaatagccatgcaaggtgaagaatgtcaccaactcagaaacccttcttcattgacgtgtccctcactcactctcctctcttcactataaatcgccactcttcgtgttctccacttcaccaactccttcaaacttattaacactttccttagttcaatatggggaagcccttcttcactctctctctttcttccctttgcttgctactcttgtcgagtgcatgctttgctattacctccagcaagagtgccaactcaacaacctcaacgcgttggaacccgaccaccgcgttgagtccgaaggtggctcttatgaacatgactctcaacacctgagctgcaatgcgccggtgtcactgtttccaaacgcaccctcaaccgcaacggcctccacttgccatcttactcaccttatccccaaatgatcattgtcgttcaaggtgcgtaatattagtaagaagtatttatcagcttaacgtgataacaataatagtaatatgaaatatttattaaatttttataattaatctctgctagaaaatttgattaatcattttagtagaatttgttttctcaactaggttttaaaacacca

SEQ ID NO: 5257 - DNA, 653 bp, Artificial
  Mutations within GlyA3B4 introduced by GmGlyA3B4_T03TALE nuclease
gttcatgtacggttgcagatataaacgaagcatagcttatgtatgaggtgtaacaaaattggaaacaatagccatgcaaggtgaagaatgtcaccaactcagaaacccttcttcattgacgtgtccctcactcactctcctctcttcactataaatcgccactcttcgtgttctccacttcaccaactccttcaaacttattaacactttccttagttcaatatggggaagcccttcttcactctctctctttcttccctttgcttgctactcttgtcgagtgcatgctttgctattacctccagcaagtttagtgccaactcaacaacctcaacgcgttggaacccgaccaccgcgttgagtccgaaggtggtcttattgaaacatggaactctcaacaccctgagctgcaatgcgccggtgtcactgtttccaaacgcaccctcaaccgcaacggcctccacttgccatcttactcaccttatccccaaatgatcattgtcgttcaaggtgcgtaatattagtaagaagtatttatcagcttaacgtgataacaataatagtaatatgaaatatttattaaatttttataattaatctctgctagaaaatttgattaatcattttagtagaatttgttttctcaatctagg

SEQ ID NO: 5258 - DNA, 661 bp, Artificial; identical to SEQ ID NO: 5046
  Mutations within GlyA3B4 introduced by GmGlyA3B4_T03TALE nuclease

SEQ ID NO: 5259 - DNA, 668 bp, Artificial
  Mutations within GlyA3B4 introduced by GmGlyA3B4_T03TALE nuclease
  misc_feature (532): n is a or c or t or g
gttcatgtacggttgcagatataaacgaagcatagcttatgtatgaggtgtaacaaaattggaaacaatagccatgcaaggtgaagaatgtcaccaactcagaaacccttcttcattgacgtgtccctcactcactctcctctcttcactataaatcgccactcttcgtgttctccacttcaccaactccttcaaacttattaacactttccttagttcaatatggggaagcccttcttcactctctctctttcttccctttgcttgctactcttgtcgagtgcatgctttgctattacctccagcaagtacgagtgccaactcaacaacctcaacgcgttggaacccgaccaccgcgttgagtccgaaggtggtcttattgaaacatggaactctcaacaccctgagctgcaatgcgccggtgtcactgtttccaaacgcaccctcaaccgcaacggcctccacttgccatcttactcaccttatccccaaatgatcattgtcgttcaaggtgcgtaatattagtaagagnatttatcagcttaacgtgataacaatatagtaatatgaaatatttattaaatttttataattaatctctgctagaaaatttgattaatcattttagtagaatttgtttttctcaactaggtttttaaaacaccaca

SEQ ID NO: 5260 - DNA, 645 bp, Artificial
  Mutations within GlyA3B4 introduced by GmGlyA3B4_T03TALE nuclease
gttcatgtacggttgcagatataaacgaagcatagcttatgtatgaggtgtaacaaaattggaaacaatagccatgcaaggtgaagaatgtcaccaactcagaaacccttcttcattgacgtgtccctcactcactctcctctcttcactataaatcgccactcttcgtgttctccacttcaccaactccttcaaacttattaacactttccttagttcaatatggggaagcccttcttcactctctctctttcttccctttgcttgctactcttgtcgagtgcatgctttgccaactcaacaacctcaacgcgttggaacccgaccaccgcgttgagtccgaaggtggtcttattgaaacatggaactctcaacacccctgagctgcaatgcgccggtgtcactgtttccaaacgcaccctcaaccgcaacggcctccacttgccatcttactcaccttatccccaaatgatcattgtcgttcaaggtgcgtaatattagtaagaagtatttatcagcttaacgtgataacaataatagtaatatgaaatatttattaaattttttataattaatctctgctagaaaatttgattaatcatttttagtagaatttgttttttctcaactaggttttaaacacca

SEQ ID NO: 5261 - DNA, 632 bp, Artificial; identical to SEQ ID NO: 2295
  Mutations within GlyA3B4 introduced by GmGlyA3B4_T03TALE nuclease

SEQ ID NO: 5262 - DNA, 632 bp, Artificial
  Mutations within GlyA3B4 introduced by GmGlyA3B4_T03TALE nuclease
gttcatgtacggttgcagatataaacgaagcatagcttatgtatgaggtgtaacaaaattggaaacaatagccatgcaaggtgaagaatgtcaccaactcagaaacccttcttcattgacgtgtccctcactcactctcctctcttcactataaatcgccactcttcgtgttctccacttcaccaactccttcaaacttattaacactttccttagttcaatatggggaagcccttcttcactctctctctttcttccctttgcttgctactcttgtcgagtgcatgctttgctattacctccagcaatgccaactcaacaacctcaacgcgttggaacccgaccaccgcgttgagtccgaaggtggtcttattgaaacatggaactctcaacaccctgagctgcaatgcgccggtgtcactgtttccaaacgcaccctcaaccgcaacggcctccacttgccatcttactcaccttatccccaaatgatcattgtcgttcaaggtgcgtaatattagtaagaagtatttatcagcttaacgtgataacaataatagtaatatgaaatatttattaaatttttataattaatctctgctagaaaatttgattaatcattttagtagaatttg

SEQ ID NO: 5263 - DNA, 622 bp, Artificial
  Mutations within GlyA3B4 introduced by GmGlyA3B4_T03TALE nuclease
gttcatgtacggttgcagatataaacgaagcatagcttatgtatgaggtgtaacaaaattggaaacaatagccatgcaaggtgaagaatgtcaccaactcagaaacccttcttcattgacgtgtccctcactcactctcctctcttcactataaatcgccactcttcgtgttctccacttcaccaactccttcaaacttattaacactttccttagttcaatatggggaagcccttcttcactctctctctttcttccctttgcttgctactcttgtcgagtgcatgctttgctattacctccagcaagttagtgccaactcaacaacctcaacgcgttggaacccgaccaccgcgttgagtccgaaggtggtcttattgaaacatggaactctcaacaccctgagctgcaatgcgccggtgtcactgtttccaaacgcaccctcaaccgcaacggcctccacttgccatcttactcaccttatccccaaatgatcattgtcgttcaaggtgcgtaatattagtaagaagtatttatcagcttaacgtgataacaataatagtaatatgaaatatttattaaatttttataattaatctctgctagaaaatttgattaatca

SEQ ID NO: 5264 - DNA, 664 bp, Artificial; identical to SEQ ID NO: 4886
  Mutations within GlyA3B4 introduced by GmGlyA3B4_T03TALE nuclease

SEQ ID NO: 5265 - DNA, 662 bp, Artificial
  Mutations within GlyA3B4 introduced by GmGlyA3B4_T03TALE nuclease
gttcatgtacggttgcagatataaacgaagcatagcttatgtatgaggtgtaacaaaattggaaacaatagccatgcaaggtgaagaatgtcaccaactcagaaacccttcttcattgacgtgtccctcactcactctcctctcttcactataaatcgccactcttcgtgttctccacttcaccaactccttcaaacttattaacactttccttagttcaatatggggaagcccttcttcactctctctctttcttccctttgcttgctactcttgtcgagtgcatgctttgctattacctccagcaagtacgccaactcaacaacctcaacgcgttggaacccgaccaccgcgttgagtccgaaggtggtcttattgaaacatggaactctcaacaccctgagctgcaatgcgccggtgtcactgtttccaaacgcaccctcaaccgcaacggcctccacttgccatcttactcaccttatccccaaatgatcattgtcgttcaaggtgcgtaatattagtaagagtatttatcagcttaacgtgataacaataatagtaatatgaaatatttattaaatttttataattaatctctgctagaaaatttgattaatcattttagtagaatttgtttttctcaactaggttttaaaacacca

SEQ ID NO: 5266 - DNA, 641 bp, Artificial
  Mutations within GlyA3B4 introduced by GmGlyA3B4_T03TALE nuclease
gttcatgtacggttgcagatataaacgaagcatagcttatgtatgaggtgtaacaaaattggaaacaatagccatgcaaggtgaagaatgtcaccaactcagaaacccttcttcattgacgtgtccctcactcactctcctctcttcactataaatcgccactcttcgtgttctccacttcaccaactccttcaaacttattaacactttccttagttcaatatggggaagcccttcttcactctctctctttcttccctttgcttgctactcttgtcgagtgcatgctttgctattacctccagcaagttcaacgctagctacatcaacctcaacctcacgcttggaacccgaccaccgcgttgagtccgaaggtggtcttattgaaacatggaactctcaacaccctgagctgcaatgcgccggtgtcactgtttccaaacgcaccctcaaccgcaacggcctccacttgccatcttactcaccttatccccaaatgatcattgtcgttcaaggtgcgtaatattagtaagagtatttatcagcttaacgtgataacaatatagtaatatgaaatatttattaaatttttataattaatctctgctagaaaatttgattaatcattttagtagaatttg

SEQ ID NO: 5267 - DNA, 651 bp, Artificial
  Mutations within GlyA3B4 introduced by GmGlyA3B4_T03TALE nuclease
gttcatgtacggttgcagatataaacgaagcatagcttatgtatgaggtgtaacaaaattggaaacaatagccatgcaaggtgaagaatgtcaccaactcagaaacccttcttcattgacgtgtccctcactcactctcctctcttcactataaatcgccactcttcgtgttctccacttcaccaactccttcaaacttattaacactttccttagttcaatatggggaagcccttcttcactctctctctttcttccctttgcttgctactcttgtcgagtgcatgctttgctattacctccagcaagttcaacgcgttggaacccgaccaccgcgttgagtccgaaggtggtcttattgaaacatggaactctcaacaccctgagctgcaatgcgccggtgtcactgtttccaaacgcaccctcaaccgcaacggcctccacttgccatcttactcaccttatccccaaatgatcattgtcgttcaaggtgcgtaatattagtaagaagtatttatcagcttaacgtgataacaataatagtaatatgaaatatttattaaattttttataattaatctctgctagaaaatttgattaatcatttttagtagaatttgttttttctcaactaggttttaaaacaccaca

SEQ ID NO: 5268 - DNA, 660 bp, Artificial; identical to SEQ ID NO: 4874
  Mutations within GlyA3B4 introduced by GmGlyA3B4_T03TALE nuclease

SEQ ID NO: 5269 - DNA, 613 bp, Artificial
  Mutations within GlyA3B4 introduced by GmGlyA3B4_T03TALE nuclease
gttcatgtacggttgcagatataaacgaagcatagcttatgtatgaggtgtaacaaaattggaaacaatagccatgcaaggtgaagaatgtcaccaactcagaaacccttcttcattgacgtgtccctcactcactctcctctcttcactataaatcgccactcttcgtgttctccacttcaccaactccttcaaacttattaacactttccttagttcaatatggggaagcccttcttcactctctctctttcttccctttgcttgctactcttgtcgagtgccaactcaacacctcaacgcgttggaacccgaccaccgcgttgagtccgaaggtggtcttattgaaacatggaactctcaacaccctgagctgcaatgcgccggtgtcactgtttccaaacgcaccctcaaccgcaacggcctccacttgccatcttactcaccttatccccaaatgatcattgtcgttcaaggtgcgtaatattagtaagaagtatttatcagcttaacgtgataacaataatagtaatatgaaatatttattaattttttataattaatctctgctagaaaatttgattaatcatttttagtagaatttgtttttctc

SEQ ID NO: 5270 - DNA, 660 bp, Artificial; identical to SEQ ID NO: 4874
  Mutations within GlyA3B4 introduced by GmGlyA3B4_T03TALE nuclease

SEQ ID NO: 5271 - DNA, 647 bp, Artificial; identical to SEQ ID NO: 4991
  Mutations within GlyA3B4 introduced by GmGlyA3B4_T03TALE nuclease

SEQ ID NO: 5272 - DNA, 646 bp, Artificial
  Mutations within GlyA3B4 introduced by GmGlyA3B4_T03TALE nuclease
  misc_feature (544): n is a or c or t or g
gttcatgtacggttgcagatataaacgaagcatagcttatgtatgaggtgtaacaaaattggaaacaatagccatgcaaggtgaagaatgtcaccaactcagaaacccttcttcattgacgtgtccctcactcactctcctctcttcactataaatcgccactcttcgtgttctccacttcaccaactccttcaaacttattaacactttccttagttcaatatggggaagcccttcttcactctctctctttcttccctttgcttgctactcttgtcgagtgcatgcttcaccaactcaacaacctcaacgcgttggaacccgaccaccgcgttgagtccgaaggtggtcttattgaaacatggaactctcaacaccctgagctgcaatgcgccggtgtcactgtttccaaacgcaccctcaaccgcaacggcctccacttgccatcttactcaccttatccccaaatgatcattgtcgttcaaggtgcgtaatattagtaagaagtatttatcagcttaacgtgataacaataatagtaatntgaaatatttattaaattttttataattaatctctgctagaaaatttgattaatcatttttagtagaatttgttttttctcaactaggttttaaacaccaca

SEQ ID NO: 5273 - DNA, 637 bp, Artificial
  Mutations within GlyA3B4 introduced by GmGlyA3B4_T03TALE nuclease
gttcatgtacggttgcagatataaacgaagcatagcttatgtatgaggtgtaacaaaattggaaacaatagccatgcaaggtgaagaatgtcaccaactcagaaacccttcttcattgacgtgtccctcactcactctcctctcttcactataaatcgccactcttcgtgttctccacttcaccaactccttcaaacttattaacactttccttagttcaatatggggaagcccttcttcactctctctctttcttccctttgcttgctactcttgtcgagtgcatgctttgctattacctccagcaagtgagtgccaactcaacaacctcaacgcgttggaacccgaccaccgcgttgagtccgaaggtggtcttattgaaacatggaactctcaacaccctgagctgcaatgcgccggtgtcactgtttccaaacgcaccctcaaccgcaacggcctccacttgccatcttactcaccttatccccaaatgatcattgtcgttcaaggtgcgtaatattagtaagaagtatttatcagcttaacgtgataacaatatagtaatatgaaatatttattaaatttttataatttaatctctgctagaaaatttgattaatcattttagtagaatttg

SEQ ID NO: 5274 - DNA, 652 bp, Artificial
  Mutations within GlyA3B4 introduced by GmGlyA3B4_T03TALE nuclease
gttcatgtacggttgcagatataaacgaagcatagcttatgtatgaggtgtaacaaaattggaaacaatagccatgcaaggtgaagaatgtcaccaactcagaaacccttcttcattgacgtgtccctcactcactctcctctcttcactataaatcgccactcttcgtgttctccacttcaccaactccttcaaacttattaacactttccttagttcaatatggggaagcccttcttcactctctctctttcttccctttgcttgctactcttgtcgagtgcatgctttgctattacctccagcaactcaacaacctcaacgcgttggaacccgaccaccgcgttgagtccgaaggtggtcttattgaaacatggaactctcaacaccctgagctgcaatgcgccggtgtcactgtttccaaacgcaccctcaaccgcaacggcctccacttgccatcttactcaccttatccccaaatgatcattgtcgttcaaggtgcgtaatattagtaagaagtatttatcagcttaacgtgataacaatatagtaatatgaaatatttattaaatttttataattaatctctgctagaaaatttgattaatcattttagtagaatttgttttctcaactaggttttaaaacacca

SEQ ID NO: 5275 - DNA, 636 bp, Artificial; identical to SEQ ID NO: 4879
  Mutations within GlyA3B4 introduced by GmGlyA3B4_T03TALE nuclease
  misc_feature (532): n is a or c or t or g

SEQ ID NO: 5276 - DNA, 632 bp, Artificial; identical to SEQ ID NO: 4835
  Mutations within GlyA3B4 introduced by GmGlyA3B4_T03TALE nuclease

SEQ ID NO: 5277 - DNA, 665 bp, Artificial
  Mutations within GlyA3B4 introduced by GmGlyA3B4_T03TALE nuclease
gttcatgtacggttgcagatataaacgaagcatagcttatgtatgaggtgtaacaaaattggaaacaatagccatgcaaggtgaagaatgtcaccaactcagaaacccttcttcattgacgtgtccctcactcactctcctctcttcactataaatcgccactcttcgtgttctccacttcaccaactccttcaaacttattaacactttccttagttcaatatggggaagcccttcttcactctctctctttcttccctttgcttgctactcttgtcgagtgcatgctttgctattacctccagcaagttcgagtgccaactcaacaacctcaacgcgttggaacccgaccaccgcgttgagtccgaaggtggtcttattgaaacatggaactctcaacaccctgagctgcaatgcgccggtgtcactgtttccaaacgcaccctcaaccgcaacggcctccacttgccatcttactcaccttatccccaaatgatcattgtcgttcaaggtgcgtaatattagtaagagtatttatcagcttaacgtgataacaataatagtaatatgaaatatttattaaatttttataattaatctctgctagaaaatttgattaatcattttagtagaatttgttttctcaactaggttttaaaacacca

SEQ ID NO: 5278 - DNA, 574 bp, Artificial
  Mutations within GlyA3B4 introduced by GmGlyA3B4_T03TALE nuclease
gttcatgtacggttgcagatataaacgaagcatagcttatgtatgaggtgtaacaaaattggaaacaatagccatgcaaggtgaagaatgtcaccaactcagaaacccttcttcattgacgtgtccctcactcactctcctctcttcactataaatcgccactcttcgtgttctccacttcaccaactccttcaaacttattaacactttccttagttcaatatggggaagcccttcttcactctctctctttcttcaacaacctcaacgcgttggaacccgaccaccgcgttgagtccgaaggtggtcttattgaaacatggaactctcaacaccctgagctgcaatgcgccggtgtcactgtttccaaacgcaccctcaaccgcaacggcctccacttgccatcttactcaccttatccccaaatgatcattgtcgttcaaggtgcgtaatattagtaagaagtatttatcagcttaacgtgataacaataatagtaatatgaaatatttattaaattttttataattaatctctgctagaaaatttgattaatcatttttagtagaatttg

SEQ ID NO: 5279 - DNA, 668 bp, Artificial
  Mutations within GlyA3B4 introduced by GmGlyA3B4_T03TALE nuclease
gttcatgtacggttgcagatataaacgaagcatagcttatgtatgaggtgtaacaaaattggaaacaatagccatgcaaggtgaagaatgtcaccaactcagaaacccttcttcattgacgtgtccctcactcactctcctctcttcactataaatcgccactcttcgtgttctccacttcaccaactccttcaaacttattaacactttccttagttcaatatggggaagcccttcttcactctctctctttcttccctttgcttgctactcttgtcgagtgcatgctttgctattacctccagcaagttcaagtgccaactcaacaacctcaacgcgttggaacccgaccaccgcgttgagtccgaaggtggtcttattgaaacatggaactctcaacaccctgagctgcaatgcgccggtgtcactgtttccaaacgcaccctcaaccgcaacggcctccacttgccatcttactcaccttatccccaaatgatcattgtcgttcaaggtgcgtaatattagtaagaagtatttatcagcttaacgtgataacaataatagtaatatgaaatatttattaaatttttataattaatctctgctagaaaatttgattaatcattttagtagaatttgtttttctcaactaggtttttaaaacacca

SEQ ID NO: 5280 - DNA, 427 bp, Artificial; identical to SEQ ID NO: 4769
  Mutations within GlyA3B4 introduced by GmGlyA3B4_T03TALE nuclease

SEQ ID NO: 5281 - DNA, 646 bp, Artificial; identical to SEQ ID NO: 4907
  Mutations within GlyA3B4 introduced by GmGlyA3B4_T03TALE nuclease

SEQ ID NO: 5282 - DNA, 642 bp, Artificial
  Mutations within GlyA3B4 introduced by GmGlyA3B4_T03TALE nuclease
gttcatgtacggttgcagatataaacgaagcatagcttatgtatgaggtgtaacaaaattggaaacaatagccatgcaaggtgaagaatgtcaccaactcagaaacccttcttcattgacgtgtccctcactcactctcctctcttcactataaatcgccactcttcgtgttctccacttcaccaactccttcaaacttattaacactttccttagttcaatatggggaagcccttcttcactctctctctttcttccctttgcttgctactcttgtcgagtgcatgctttgctattacctccagcaagtgcaactacaacaacctcaacgcgttggaacccgaccaccgcgttgagtccgaaggtggtcttattgaaacatggaactctcaacaccctgagctgcaatgcgccggtgtcactgtttccaaacgcaccctcaaccgcaacggcctccacttgccatcttactcaccttatccccaaatgatcattgtcgttcaaggtgcgtaatattagtaagaagtatttatcagcttaacgtgataacaataatagtaatatgaaatatttattaaatttttataattaatctctgctagaaaatttgattaatcattttagtagaatttgttttctcaa

SEQ ID NO: 5283 - DNA, 658 bp, Artificial; identical to SEQ ID NO: 4931
  Mutations within GlyA3B4 introduced by GmGlyA3B4_T03TALE nuclease

SEQ ID NO: 5284 - DNA, 665 bp, Artificial; identical to SEQ ID NO: 4918
  Mutations within GlyA3B4 introduced by GmGlyA3B4_T03TALE nuclease

SEQ ID NO: 5285 - DNA, 663 bp, Artificial
  Mutations within GlyA3B4 introduced by GmGlyA3B4_T03TALE nuclease
gttcatgtacggttgcagatataaacgaagcatagcttatgtatgaggtgtaacaaaattggaaacaatagccatgcaaggtgaagaatgtcaccaactcagaaacccttcttcattgacgtgtccctcactcactctcctctcttcactataaatcgccactcttcgtgttctccacttcaccaactccttcaaacttattaacactttccttagttcaatatggggaagcccttcttcactctctctctttcttccctttgcttgctactcttgtcgagtgcatgctttgctattacctccagcaagttctgccaactcaacaacctcaacgcgttggaacccgaccaccgcgttgagtccgaaggtggtcttattgaaacatggaactctcaacaccctgagctgcaatgcgccggtgtcactgtttccaaacgcaccctcaaccgcaacggcctccacttgccatcttactcaccttatccccaaatgatcattgtcgttcaaggtgcgtaatattagtaagaagtatttatcagcttaacgtgataacaataatagtaatatgaaatatttattaaatttttataattaatctctgctagaaaatttgattaatcattttagtagaatttgttttctcaactaggttttaaaacacca

SEQ ID NO: 5286 - DNA, 659 bp, Artificial
  Mutations within GlyA3B4 introduced by GmGlyA3B4_T03TALE nuclease
gttcatgtacggttgcagatataaacgaagcatagcttatgtatgaggtgtaacaaaattggaaacaatagccatgcaaggtgaagaatgtcaccaactcagaaacccttcttcattgacgtgtccctcactcactctcctctcttcactataaatcgccactcttcgtgttctccacttcaccaactccttcaaacttattaacactttccttagttcaatatggggaagcccttcttcactctctctctttcttccctttgcttgctactcttgtcgagtgcatgctttgctattacctccagcaagccaactcaacaacctcaacgcgttggaacccgaccaccgcgttgagtccgaaggtggtcttattgaaacatggaactctcaacaccctgagctgcaatgcgccggtgtcactgtttccaaacgcaccctcaaccgcaacggcctccacttgccatcttactcaccttatccccaaatgatcattgtcgttcaaggtgcgtaatattagtaagaagtatttatcagcttaacgtgataacaataatagtaatatgaaatatttattaaatttttataattaatctctgctagaaaatttgattaatcattttagtagaatttgtttttctcaactaggttttaaaacacca

SEQ ID NO: 5287 - DNA, 638 bp, Artificial
  Mutations within GlyA3B4 introduced by GmGlyA3B4_T03TALE nuclease
gttcatgtacggttgcagatataaacgaagcatagcttatgtatgaggtgtaacaaaattggaaacaatagccatgcaaggtgaagaatgtcaccaactcagaaacccttcttcattgacgtgtccctcactcactctcctctcttcactataaatcgccactcttcgtgttctccacttcaccaactccttcaaacttattaacactttccttagttcaatatggggaagcccttcttcactctctctctttcttccctttgcttgctactcttgtcgagtgcatgctttgctattacctccagcaagttagtgccaactcaacaacctcaacgcgttggaacccgaccaccgcgttgagtccgaaggtggtcttattgaaacatggaactctcaacaccctgagctgcaatgcgccggtgtcactgtttccaaacgcaccctcaaccgcaacggcctccacttgccatcttactcaccttatccccaaatgatcattgtcgttcaaggtgcgtaatattagtaagaagtatttatcagcttaacgtgataacaataatagtaatatgaaatatttattaaatttttataatttaatctctgctagaaaatttgattaatcattttagtagaatttg

SEQ ID NO: 5288 - DNA, 665 bp, Artificial
  Mutations within GlyA3B4 introduced by GmGlyA3B4_T03TALE nuclease
gttcatgtacggttgcagatataaacgaagcatagcttatgtatgaggtgtaacaaaattggaaacaatagccatgcaaggtgaagaatgtcaccaactcagaaacccttcttcattgacgtgtccctcactcactctcctctcttcactataaatcgccactcttcgtgttctccacttcaccaactccttcaaacttattaacactttccttagttcaatatggggaagcccttcttcactctctctctttcttccctttgcttgctactcttgtcgagtgcatgctttgctattacctccagcaagttcatgccaactcaacaacctcaacgcgttggaacccgaccaccgcgttgagtccgaaggtggtcttattgaaacatggaactctcaacaccctgagctgcaatgcgccggtgtcactgtttccaaacgcaccctcaaccgcaacggcctccacttgccatcttactcaccttatccccaaatgatcattgtcgttcaaggtgcgtaatattagtaagaagtatttatcagcttaacgtgataacaataatagtaatatgaaatatttattaaatttttataattaatctctgctagaaaatttgattaatcattttagtagaatttgtttttctcaactaggttttaaaacacca

SEQ ID NO: 5289 - DNA, 616 bp, Artificial
  Mutations within GlyA3B4 introduced by GmGlyA3B4_T03TALE nuclease
gttcatgtacggttgcagatataaacgaagcatagcttatgtatgaggcgtaacaaaattggaaacaatagccatgcaaggtgaagaatgtcaccaactcagaaacccttcttcattgacgtgtccctcactcactctcctctcttcactataaatcgccactcttcgtgttctccacttcaccaactccttcaaacttattaacactttccttagttcaatatggggaagcccttcttcactctctctctttcttccctttgcttgctactcttgtcgagtgcatgctttgctattacctccagcaagtgtgccaactcaacaacctcaacgcgttggaaccgaccaccgcgttgagtccgaaggtggtcttattgaaacatggaactctcaacaccctgagctgcaatgcgccggtgtcactgtttccaaacgcaccctcaaccgcaacggcctccacttgccaatcttactcaccttatccccaaatgaatcattgtcgttcaaggtgcgtaatattagtaagaagtatttatcagcttaacgtgataacaataatagtaatatgaaatatttattaaatttttataattaatctctgctagaaaatttgatt

SEQ ID NO: 5290 - DNA, 663 bp, Artificial; identical to SEQ ID NO: 4967
  Mutations within GlyA3B4 introduced by GmGlyA3B4_T03TALE nuclease

SEQ ID NO: 5291 - DNA, 644 bp, Artificial; identical to SEQ ID NO: 4917
  Mutations within GlyA3B4 introduced by GmGlyA3B4_T03TALE nuclease

SEQ ID NO: 5292 - DNA, 630 bp, Artificial
  Mutations within GlyA3B4 introduced by GmGlyA3B4_T03TALE nuclease
gttcatgtacggttgcagatataaacgaagcatagcttatgtatgaggtgtaacaaaattggaaacaatagccatgcaaggtgaagaatgtcaccaactcagaaacccttcttcattgacgtgtccctcactcactctcctctcttcactataaatcgccactcttcgtgttctccacttcaccaactccttcaaacttattaacactttccttagttcaatatggggaagcccttcttcactctctctctttcttccctttgcttgctactcttgtcgagtgcatgctttgctattacctccagcaagccaactcaacaacctcaacgcgttggaacccgaccaccgcgttgagtccgaaggtggtcttattgaaacatggaactctcaacaccctgagctgcaatgcgccggtgtcactgtttccaaacgcaccctcaaccgcaacggcctccacttgccatcttactcaccttatccccaaatgatcattgtcgttcaaggtgcgtaatattagtaagaagtatttatcagcttaacgtgataacaatatagtaatatgaaatatttattaaatttttataattaatctctgctagaaaatttgattaatcattttagtagaatttg

SEQ ID NO: 5293 - DNA, 480 bp, Artificial; identical to SEQ ID NO: 4790
  Mutations within GlyA3B4 introduced by GmGlyA3B4_T03TALE nuclease

SEQ ID NO: 5294 - DNA, 637 bp, Artificial
  Mutations within GlyA3B4 introduced by GmGlyA3B4_T03TALE nuclease
  misc_feature (532): n is a or c or t or g
gttcatgtacggttgcagatataaacgaagcatagcttatgtatgaggtgtaacaaaattggaaacaatagccatgcaaggtgaagaatgtcaccaactcagaaacccttcttcattgacgtgtccctcactcactctcctctcttcactataaatcgccactcttcgtgttctccacttcaccaactccttcaaacttattaacactttccttagttcaatatggggaagcccttcttcactctctctctttcttccctttgcttgctactcttgtcgagtgcatgctttgctattacctccagcaagttcgagtgccaactcaacaacctcaacgcgttggaacccgaccaccgcgttgagtccgaaggtggtcttattgaaacatggaactctcaacaccctgagctgcaatgcgccggtgtcactgtttccaaacgcaccctcaaccgcaacggcctccacttgccatcttactcaccttatccccaaatgatcattgtcgttcaaggtgcgtaatattagtaagagnatttatcagcttaacgtgatacaataatagtaatatgaaatatttattaaatttttataattaatctctgctagaaaatttgattaatcattttagtagaatttg

SEQ ID NO: 5295 - DNA, 651 bp, Artificial
  Mutations within GlyA3B4 introduced by GmGlyA3B4_T03TALE nuclease
gttcatgtacggttgcagatataaacgaagcatagcttatgtatgaggtgtaacaaaattggaaacaatagccatgcaaggtgaagaatgtcaccaactcagaaacccttcttcattgacgtgtccctcactcactctcctctcttcactataaatcgccactcttcgtgttctccacttcaccaactccttcaaacttattaacactttccttagttcaatatggggaagcccttcttcactctctctctttcttccctttgcttgctactcttgtcgagtgcatgctttgctattacctccagcaagttcaagtgccaactcaacaacctcaacgcgttggaacccgaccaccgcgttgagtccgaaggtggtcttattgaaacatggaactctcaacaccctgagctgcaatgcgccggtgtcactgtttccaaacgcaccctcaaccgcaacggcctccacttgccatcttactcaccttatccccaaatgatcattgtcgttcaaggtgcgtaatattagtaagaagtatttatcagcttaacgtgataacaataatagtaatatgaaatatttattaaatttttataattaatctctgctagaaaatttgattaatcattttagtagaatttgttttctcaacta

SEQ ID NO: 5296 - DNA, 662 bp, Artificial
  Mutations within GlyA3B4 introduced by GmGlyA3B4_T03TALE nuclease
gttcatgtacggttgcagatataaacgaagcatagcttatgtatgaggtgtaacaaaattggaaacaatagccatgcaaggtgaagaatgtcaccaactcagaaacccttcttcattgacgtgtccctcactcactctcctctcttcactataaatcgccactcttcgtgttctccacttcaccaactccttcaaacttattaacactttccttagttcaatatggggaagcccttcttcactctctctctttcttccctttgcttgctactcttgtcgagtgcatgctttgctattacctccagcaagagtgccaactcaacaacctcaacgcgttggaacccgaccaccgcgttgagtccgaaggtggtcttattgaaacatggaactctcaacaccctgagctgcaatgcgccggtgtcactgtttccaaacgcaccctcaaccgcaacggcctccacttgccatcttactcaccttatccccaaatgatcattgtcgttcaaggtgcgtaatattagtaagaagtatttatcagcttaacgtgataacaatatagtaatatgaaatatttattaaatttttataattaatctctgctagaaaatttgattaatcattttagtagaatttgtttttctcaactaggttttaaaacacca

SEQ ID NO: 5297 - DNA, 663 bp, Artificial; identical to SEQ ID NO: 4922
  Mutations within GlyA3B4 introduced by GmGlyA3B4_T03TALE nuclease

SEQ ID NO: 5298 - DNA, 533 bp, Artificial
  Mutations within GlyA3B4 introduced by GmGlyA3B4_T03TALE nuclease
gttcatgtacggttgcagatataaacgaagcatagcttatgtatgaggtgtaacaaaattggaaacaatagccatgcaaggtgaagaatgtcaccaactcagaaacccttcttcattgacgtgtccctcactcactctcctctcttcactataaatcgccactcttcgtgttctccacttcaccaactccttcaaacttattaacactttccttagttcaatatggggaagcccttcttcactctctctctttcttccctttgcttgctactcttgtcgagtgcatgctttgctattacctccagcaagttcaacgcgttggaacccgaccaccgcgttgagtccgaaggtgtcttattgaacatggaactctcacacctgagctgcatgcgccggtgtcactgttccaacgcacctcaaccgcaacggccatccaccttgccatcttactcaccttactccccaaatcgatcattgtccgattcaaggtgcgtatattagtcaagaagtatttatcagcttaacgtgataac

SEQ ID NO: 5299 - DNA, 659 bp, Artificial; identical to SEQ ID NO: 5286
  Mutations within GlyA3B4 introduced by GmGlyA3B4_T03TALE nuclease

SEQ ID NO: 5300 - DNA, 684 bp, Artificial
  Mutations within GlyA3B4 introduced by GmGlyA3B4_T03TALE nuclease
gttcatgtacggttgcagatataaacgaagcatagcttatgtatgaggtgtaacaaaattggaaacaatagccatgcaaggtgaagaatgtcaccaactcagaaacccttcttcattgacgtgtccctcactcactctcctctcttcactataaatcgccactcttcgtgttctccacttcaccaactccttcaaacttattaacactttccttagttcaatatggggaagcccttcttcactctctctctttcttccctttgcttgctactcttgtcgagtgcatgctttgctattaccccccaatccccttttttcactgcatccagcgcaggacgcccgccgaggcaggccaaggcgacgaggtggtcgacgagtgcccaactcaacaacctcaacgcgttggaacccgaccaccgcgttgagtccgaaggtggtcttattgaaacatggaactctcaacaccctgagctgcaatgcgccggtgtcactgtttccaaacgcaccctcaaccgcaacggcctccacttgccatcttactcacctttatccccaaatgatcattgtcgttcaaggtgcgtaatattagtaagaagtatttatcagcttaacgtgataacaataatagtaatatgaaaatatttattaaaattttttataattaatctctgctagaaaaatttg

SEQ ID NO: 5301 - DNA, 645 bp, Artificial
  Mutations within GlyA3B4 introduced by GmGlyA3B4_T03TALE nuclease
gttcatgtacggttgcagatataaacgaagcatagcttatgtatgaggtgtaacaaaattggaaacaatagccatgcaaggtgaagaatgtcaccaactcagaaacccttcttcattgacgtgtccctcactcactctcctctcttcactataaatcgccactcttcgtgttctccacttcaccaactccttcaaacttattaacactttccttagttcaatatggggaagcccttcttcactctctctctttcttccctttgcttgctactcttgtcgagtgcatgctttgctattacctccagcaagtagtgccaactcaacaacctcaacgcgttggaacccgaccaccgcgttgagtccgaaggtggtcttattgaaacatggaactctcaacaccctgagctgcaatgcgccggtgtcactgtttccaaacgcaccctcaaccgcaacggcctccacttgccatcttactcaccttatccccaaatgatcattgtcgttcaaggtgcgtaatattagtaagaagtatttatcagcttaacgtgataacaataatagtaatatgaaatatttattaaatttttataattaatctctgctagaaaatttgattaatcattttagtagaatttgttttctcaa

SEQ ID NO: 5302 - DNA, 658 bp, Artificial
  Mutations within GlyA3B4 introduced by GmGlyA3B4_T03TALE nuclease
gttcatgtacggttgcagatataaacgaagcatagcttatgtatgaggtgtaacaaaattggaaacaatagccatgcaaggtgaagaatgtcaccaactcagaaacccttcttcattgacgtgtccctcactcactctcctctcttcactataaatcgccactcttcgtgttctccacttcaccaactccttcaaacttattaacactttccttagttcaatatggggaagcccttcttcactctctctctttcttccctttgcttgctactcttgtcgagtgcatgctttgctattacctccagcaagttcaagtgccaactcaacaacctcaacgcgttggaacccgaccaccgcgttgagtccgaaggtggtcttattgaaacatggaactctcaacaccctgagctgcaatgcgccggtgtcactgtttccaaacgcaccctcaaccgcaacggcctccacttgccatcttactcaccttatccccaaatgatcattgtcgttcaaggtgcgtaatattagtaagaagtatttatcagcttaacgtgataacaataatagtaatatgaaatatttattaaatttttataattaatctctgctagaaaatttgattaatcattttagtagaatttgtttttctcaactaggtttt

SEQ ID NO: 5303 - DNA, 664 bp, Artificial
  Mutations within GlyA3B4 introduced by GmGlyA3B4_T03TALE nuclease
gttcatgtacggttgcagatataaacgaagcatagcttatgtatgaggtgtaacaaaattggaaacaatagccatgcaaggtgaagaatgtcaccaactcagaaacccttcttcattgacgtgtccctcactcactctcctctcttcactataaatcgccactcttcgtgttctccacttcaccaactccttcaaacttattaacactttccttagttcaatatggggaagcccttcttcactctctctctttcttccctttgcttgctactcttgtcgagtgcatgctttgctattacctccagcaagttcaagtgccactcaacaacctcaacgcgttggaaccgaccaccgcgttgagtccgaaggtggtcttattgaaacatggaactctcaacaccctgagctgcaatgcgccggtgtcactgtttccaaacgcaccctcaaccgcaacggcctccacttgccatcttactcaccttatccccaaatgatcattgtcgttcaaggtgcgtaatattagtaagaagtatttatcagcttaacgtgataacaataatagtaatatgaaatatttattaaatttttataattaatctctgctagaaaatttgattaatcattttagtagaatttgttttctcaatctaggttttaaaacacc

SEQ ID NO: 5304 - DNA, 598 bp, Artificial
  Mutations within GlyA3B4 introduced by GmGlyA3B4_T03TALE nuclease
gttcatgtacggttgcagatataaacgaagcatagcttatgtatgaggtgtaacaaaattggaaacaatagccatgcaaggtgaagaatgtcaccaactcagaaacccttcttcattgacgtgtccctcactcactctcctctcttcactataaatcgccactcttcgtgttctccacttcaccaactccttcaaacttattaacactttccttagttcaatatggggaagcccttcttcactctctctctttcttccctttgcttgctactcttgtcgagtgcatgctttgctattacctccagcaagttcgaaggtggtcttattgaaacatggaactctcaacaccctgagctgcaatgcgccggtgtcactgtttccaaacgcaccctcaaccgcaacggcctccacttgccatcttactcaccttatccccaaatgatcattgtcgttcaaggtgcgtaatattagtaagaagtatttatcagcttaacgtgataacaataatagtaatatgaaatatttattaaattttttataattaatctctgctagaaaatttgattaatcatttttagtagaatttgtttttctcaac

SEQ ID NO: 5305 - DNA, 664 bp, Artificial
  Mutations within GlyA3B4 introduced by GmGlyA3B4_T03TALE nuclease
gttcatgtacggttgcagatataaacgaagcatagcttatgtatgaggtgtaacaaaattggaaacaatagccatgcaaggtgaagaatgtcaccaactcagaaacccttcttcattgacgtgtccctcactcactctcctctcttcactataaatcgccactcttcgtgttctccacttcaccaactccttcaaacttattaacactttccttagttcaatatggggaagcccttcttcactctctctctttcttccctttgcttgctactcttgtcgagtgcatgctttgctattacctccagcaagttgagtgccaactcaacaacctcaacgcgttggaacccgaccaccgcgttgagtccgaaggtggtcttattgaaacatggaactctcaacaccctgagctgcaatgcgccggtgtcactgtttccaaacgcaccctcaaccgcaacggcctccacttgccatcttactcaccttatccccaactgatcattgtcgttcaaggtgcgtaatattagtaagaagtatttatcagcttaacgtgataacaataatagtaatatgaaatatttattaaatttttataattaatctctgctagaaaatttgattaatcattttagtagaatttgttttctcaactaggttttaaaacacc

SEQ ID NO: 5306 - DNA, 622 bp, Artificial
  Mutations within GlyA3B4 introduced by GmGlyA3B4_T03TALE nuclease
gttcatgtacggttgcagatataaacgaagcatagcttatgtatgaggtgtaacaaaattggaaacaatagccatgcaaggtgaagaatgtcaccaactcagaaacccttcttcattgacgtgtccctcactcactctcctctcttcactataaatcgccactcttcgtgttctccacttcaccaactccttcaaacttattaacactttccttagttcaatatggggaagcccttcttcactctctctctttcttccctttgcttgctactcttgtcgagtgcatgctttgctattacctccagcaagttcgagtgccaactcaacaacctcaacgcgttggaacccgaccaccgcgttgagtccgaaggtggtcttattgaaacatggaactctcaacaccctgagctgcaatgcgccggtgtcactgtttccaaacgcaccctcaaccgcaacggcctccacttgccatcttactcaccttatccccaaatgatcattgtcgttcaaggtgcgtaatattagtaagagtatttatcagcttaacgtgataacaatatagtaatatgaaatatttattaaatttttataattaatctctgctagaaaatttgattaatca

SEQ ID NO: 5307 - DNA, 637 bp, Artificial
  Mutations within GlyA3B4 introduced by GmGlyA3B4_T03TALE nuclease
gttcatgtacggttgcagatataaacgaagcatagcttatgtatgaggtgtaacaaaattggaaacaatagccatgcaaggtgaagaatgtcaccaactcagaaacccttcttcattgacgtgtccctcactcactctcctctcttcactataaatcgccactcttcgtgttctccacttcaccaactccttcaaacttattaacactttccttagttcaatatggggaagcccttcttcactctctctctttcttccctttgcttgctactcttgtcgagtgcatgctttgctattacctccagcaagttcgagtgccaactcaacaacctcaacgcgttggaacccgaccaccgcgttgagtccgaaggtggtcttattgaaacatggaactctcaacaccctgagctgcaatgcgccggtgtcactgtttccaaacgcaccctcaaccgcaacggcctccacttgccatcttactcaccttatccccaaatgatcattgtcgttcaaggtgcgtaatattagtaagagtatttatcagcttaacgtgataacaatatagtaatatgaaatatttattaaatttttataattaatctctgctagaaaatttgattaatcattttagtagaatttg

SEQ ID NO: 5308 - DNA, 623 bp, Artificial
  Mutations within GlyA3B4 introduced by GmGlyA3B4_T03TALE nuclease
gttcatgtacggttgcagatataaacgaagcatagcttatgtatgaggtgtaacaaaattggaaacaatagccatgcaaggtgaagaatgtcaccaactcagaaacccttcttcattgacgtgtccctcactcactctcctctcttcactataaatcgccactcttcgtgttctccacttcaccaactccttcaaacttattaacactttccttagttcaatatggggaagcccttcttcactctctctctttcttccctttgcttgctactcttgtcgagtgcatgctttgctattacctccagcaagttcagtgccaactcaacaacctcaacgcgttggaacccgaccaccgcgttgagtccgaaggtggtcttattgaaacatggaactctcaacaccctgagctgcaatgcgccggtgtcactgtttccaaacgcaccctcaaccgcaacggcctccacttgccatcttactcaccttatccccaaatgatcattgtcgttcaaggtgcgtaatattagtaagaagtatttatcagcttaacgtgataacaataatagtaatatgaaatatttattaaatttttataattaatctctgctagaaaatttgattaatca

SEQ ID NO: 5309 - DNA, 635 bp, Artificial; identical to SEQ ID NO: 5186
  Mutations within GlyA3B4 introduced by GmGlyA3B4_T03TALE nuclease

SEQ ID NO: 5310 - DNA, 604 bp, Artificial
  Mutations within GlyA3B4 introduced by GmGlyA3B4_T03TALE nuclease
gttcatgtacggttgcagatataaacgaagcatagcttatgtatgaggtgtaacaaaattggaaacaatagccatgcaaggtgaagaatgtcaccaactcagaaacccttcttcattgacgtgtccctcactcactctcctctcttcactataaatcgccactcttcgtgttctccacttcaccaactccttcaaacttattaacactttccttagttcaatatggggaagcccttcttcactctctctctttcttccctttgcttgctactcttgtcgagtgcatgctttgctattacctccgaaggtggtcttattgaaacatggaactctcaacaccctgagctgcaatgcgccggtgtcactgtttccaaacgcaccctcaaccgcaacggcctccacttgccatcttactcaccttatccccaaatgatcattgtcgttcaaggtgcgtaatattagtaagaagtatttatcagcttaacgtgataacaataatagtaatatgaaatatttattaaattttttataattaatctctgctagaaaatttgattaatcatttttagtagaatttgtttttctcaactaggtttttaaaaca

SEQ ID NO: 5311 - DNA, 690 bp, Artificial
  Mutations within GlyA3B4 introduced by GmGlyA3B4_T03TALE nuclease
gttcatgtacggttgcagatataaacgaagcatagcttatgtatgaggtgtaacaaaattggaaacaatagccatgcaaggtgaagaatgtcaccaactcagaaacccttcttcattgacgtgtccctcactcactctcctctcttcactataaatcgccactcttcgtgttctccacttcaccaactccttcaaacttattaacactttccttagttcaatatggggaagcccttcttcactctctctctttcaagccgtgggcctggcacagcaccggcaacagccgctggaccgtctccagcgcctgcttgccaccgccattgctggcgatggccaccgagtgccaactcaacaacctcaacgcgttggaaccccgaccaccgcgttgagtccgaaggtggtcttattgaaacatggaactctcaacaccctgagctgcaatgcgccggtgtcactgtttccaaacgcaccctcaaccgcaacggcctccacttgccatcttactcaccttatccccaaatgatcattgtcgttcaaggtgcgtaatattagtaagaagtatttatcagcttaacgtgataacaataatagtaatatgaaatatttattaaattttttataattaatctctgctagaaaatttgattaatcatttttagtagaatttgtttttctcaactaggtttt

SEQ ID NO: 5312 - DNA, 663 bp, Artificial; identical to SEQ ID NO: 5285
  Mutations within GlyA3B4 introduced by GmGlyA3B4_T03TALE nuclease

SEQ ID NO: 5313 - DNA, 665 bp, Artificial; identical to SEQ ID NO: 4810
  Mutations within GlyA3B4 introduced by GmGlyA3B4_T03TALE nuclease

SEQ ID NO: 5314 - DNA, 470 bp, Artificial
  Mutations within GlyA3B4 introduced by GmGlyA3B4_T03TALE nuclease
gttcatgtacggttgcagatataaacgaagcatagcttatgtatgaggtgtaacaaaattggaaacaatagccatgcaaggtgaagaatgtcaccaactcagaaacccttcttcattgacgtgtccctcactcactctcctctcttcactataaatcgccactcttcgtgttctccacttcaccaactccttcaaacttattaacactttccttagttcaatatggggaagcccttcttcactctctctctttcttccctcaaccgcaacggcctccacttgccatcttactcaccttatccccaaatgatcattgtcgttcaaggtgcgtaatattagtaagaagtatttatcagcttaacgtgataacaataatagtaatatgaaatatttattaaattttttataattaatctctgctagaaaatttgattaatcatttttagtagaatttgtttttctcaactagg

SEQ ID NO: 5315 - DNA, 657 bp, Artificial
  Mutations within GlyA3B4 introduced by GmGlyA3B4_T03TALE nuclease
gttcatgtacggttgcagatataaacgaagcatagcttatgtatgaggtgtaacaaaattggaaacaatagccatgcaaggtgaagaatgtcaccaactcagaaacccttcttcattgacgtgtccctcactcactctcctctcttcactataaatcgccactcttcgtgttctccacttcaccaactccttcaaacttattaacactttccttagttcaatatggggaagcccttcttcactctctctctttcttccctttgcttgctactcttgtcgagtgcatgctttgctattacctccagcaagtagtgccaactcaacaacctcaacgcgttggaacccgaccaccgcgttgagtccgaaggtggtcttattgaaacatggaactctcaacaccctgagctgcaatgcgccggtgtcactgtttccaaacgcaccctcaaccgcaacggcctccacttgccatcttactcaccttatccccaaatgatcattgtcgttcaaggtgcgtaatattagtaagaagtatttatcagcttaacgtgataacaatatagtaatatgaaatatttattaaatttttataattaatctctgctagaaaatttgattaatcattttagtagaatttgttttctcaactaggttttaaaa

SEQ ID NO: 5316 - DNA, 413 bp, Artificial; identical to SEQ ID NO: 4784
  Mutations within GlyA3B4 introduced by GmGlyA3B4_T03TALE nuclease

SEQ ID NO: 5317 - DNA, 669 bp, Artificial
  Mutations within GlyA3B4 introduced by GmGlyA3B4_T03TALE nuclease
gttcatgtacggttgcagatataaacgaagcatagcttatgtatgaggtgtaacaaaaattggaaacaatagccatgcaaggtgaagaatgtcaccaactcagaaacccttcttcattgacgtgtccctcactcactctcctctcttcactataaatcgccactcttcgtgttctccacttcaccaactccttcaaacttattaacactttccttagttcaatatggggaagcccttcttcactctctctctttcttccctttgcttgctactcttgtcgagtgcatgctttgctattacctccagcaagttgtgccaactcaacaacctcaacgcgttggaacccgaccaccgcgttgagtccgaaggtggtcttattgaaacatggaactctcaacaccctgagctgcaatgcgccggtgtcactgtttccaaacgcaccctcaaccgcaacggcctccaacttgccatcttcactcaccttatccccaactgaatcattgtcgttcaaggtgcgtaatattagtaagaagtatttatcagcttaacgtgataacaataatagtaatatgaaatatttattaaatttttataattaatctctgctagaaaatttgattaatcatttttagtagaatttgtttttctcaactaggttttaaaacacca

SEQ ID NO: 5318 - DNA, 657 bp, Artificial
  Mutations within GlyA3B4 introduced by GmGlyA3B4_T03TALE nuclease
gttcatgtacggttgcagatataaacgaagcatagcttatgtatgaggtgtaacaaaattggaaacaatagccatgcaaggtgaagaatgtcaccaactcagaaacccttcttcattgacgtgtccctcactcactctcctctcttcactataaatcgccactcttcgtgttctccacttcaccaactccttcaaacttattaacactttccttagttcaatatggggaagcccttcttcactctctctctttcttccctttgcttgctactcttgtcgagtgcatgctttgctattacctccagcaaagtgccaactcaacaacctcaacgcgttggaacccgaccaccgcgttgagtccgaaggtggtcttattgaaacatggaactctcaacaccctgagctgcaatgcgccggtgtcactgtttccaaacgcaccctcaaccgcaacggcctccacttgccatcttactcaccttatccccaaatgatcattgtcgttcaaggtgcgtaatattagtaagaagtatttatcagcttaacgtgataacaataatagtaatatgaaatatttattaaatttttataattaatctctgctagaaaatttgattaatcattttagtagaatttgttttctcaactaggtttttaaaa

SEQ ID NO: 5319 - DNA, 621 bp, Artificial
  Mutations within GlyA3B4 introduced by GmGlyA3B4_T03TALE nuclease
gttcatgtacggttgcagatataaacgaagcatagcttatgtatgaggtgtaacaaaattggaaacaatagccatgcaaggtgaagaatgtcaccaactcagaaacccttcttcattgacgtgtccctcactcactctcctctcttcactataaatcgccactcttcgtgttctccacttcaccaactccttcaaacttattaacactttccttagttcaatatggggaagcccttcttcactctctctctttcttccctttgcttgctactcttgtcgagtgcatgctttgctattacctccagcaagttgtgccaactcaacaacctcaacgcgttggaacccgaccaccgcgttgagtccgaaggtggtcttattgaaacatggaactctcaacaccctgagctgcaatgcgccggtgtcactgtttccaaacgcaccctcaaccgcaacggcctccacttgccatcttactcaccttatccccaaatgatcattgtcgttcaaggtgcgtaatattagtaagaagtatttatcagcttaacgtgataacaataatagtaatatgaaatatttattaaatttttataattaatctctgctagaaaatttgattaatca

SEQ ID NO: 5320 - DNA, 666 bp, Artificial
  Mutations within GlyA3B4 introduced by GmGlyA3B4_T03TALE nuclease
gttcatgtacggttgcagatataaacgaagcatagcttatgtatgaggtgtaacaaaattggaaacaatagccatgcaaggtgaagaatgtcaccaactcagaaacccttcttcattgacgtgtccctcactcactctcctctcttcactataaatcgccactcttcgtgttctccacttcaccaactccttcaaacttattaacactttccttagttcaatatggggaagcccttcttcactctctctctttcttccctttgcttgctactcttgtcgagtgcatgctttgctattacctccagcaagtgagtgccaactcaacaacctcaacgcgttggaacccgaccaccgcgttgagtccgaaggtggtcttattgaaacatggaactctcaacaccctgagctgcaatgcgccggtgtcactgtttccaaacgcaccctcaaccgcaacggcctccacttgccatcttactcaccttatccccaaatgatcattgtcgttcaaggtgcgtaatattagtaagaagtatttatcagcttaacgtgataacaataatagtaatatgaaatatttattaaatttttataatttaatctctgctagaaaatttgattaatcattttagtagaatttgtttttctcaactaggttttaaaacacca

SEQ ID NO: 5321 - DNA, 634 bp, Artificial
  Mutations within GlyA3B4 introduced by GmGlyA3B4_T03TALE nuclease
gttcatgtacggttgcagatataaacgaagcatagcttatgtatgaggtgtaacaaaaattggaaacaatagccatgcaaggtgaagaatgtcaccaactcagaaacccttcttcattgacgtgtccctcactcactctcctctcttcactataaatcgccactcttcgtgttctccacttcaccaactccttcaaacttattaacactttccttagttcaatatggggaagcccttcttcactctctctctttcttccctttgcttgctactcttgtcgagtgcatgctttgctattacctccagcaagtgccaactcaacaacctcaacgcgttggaacccgaccaccgcgttgagtccgaaggtggtcttattgaaacatggaactctcaacaccctgagctgcaatgcgccggtgtcactgtttccaaacgcaccctcaaccgcaacggcctccacttgccatcttactcaccttatccccaaatgatcattgtcgttcaaggtgcgtaatattagtaagaagtatttatcagcttaacgtgataacaataatagtaatatgaaatatttattaaatttttataattaatctctgctagaaaatttgattaatcattttagtagaatttg

SEQ ID NO: 5322 - DNA, 622 bp, Artificial; identical to SEQ ID NO: 5075
  Mutations within GlyA3B4 introduced by GmGlyA3B4_T03TALE nuclease

SEQ ID NO: 5323 - DNA, 557 bp, Artificial
  Mutations within GlyA3B4 introduced by GmGlyA3B4_T03TALE nuclease
gttcatgtacggttgcagatataaacgaagcatagcttatgtatgaggtgtaacaaaattggaaacaatagccatgcaaggtgaagaatgtcaccaactcagaaacccttcttcattgacgtgtccctcactcactctcctctcttcactataaatcgccactcttcgtgttctccacttcaccaactccttcaaacttattaacactttccttagttcaatatggggaagcccttcttcactctctctctttcttccctttgcttgctactcttgtcgagtgcatgctttgctattacctccagcaagttgagtccgaaggtggtcttattgaaacatggaactctcaacaccctgagctgcaatgcgccggtgtcactgtttccaaacgcaccctcaaccgcaacggcctccacttgccatcttactcaccttatccccaaatgatcattgtcgttcaaggtgcgtaatattagtaagaagtatttatcagcttaacgtgataacaataatagtaatatgaatatttattaatttttataattaatctctgctag

SEQ ID NO: 5324 - DNA, 643 bp, Artificial
  Mutations within GlyA3B4 introduced by GmGlyA3B4_T03TALE nuclease
gttcatgtacggttgcagatataaacgaagcatagcttatgtatgaggtgtaacaaaattggaaacaatagccatgcaaggtgaagaatgtcaccaactcagaaacccttcttcattgacgtgtccctcactcactctcctctcttcactataaatcgccactcttcgtgttctccacttcaccaactccttcaaacttattaacactttccttagttcaatatggggaagcccttcttcactctctctctttcttccctttgcttgctactcttgtcgagtgcatgctttgctattacctccagcaatcaacaacctcaacgcgttggaacccgaccaccgcgttgagtccgaaggtggtcttattgaaacatggaactctcaacaccctgagctgcaatgcgccggtgtcactgtttccaaacgcaccctcaaccgcaacggcctccacttgccatcttactcaccttatccccaaatgatcattgtcgttcaaggtgcgtaatattagtaagaagtatttatcagcttaacgtgataacaataatagtaatatgaaatatttattaaattttttataattaatctctgctagaaaatttgattaatcatttttagtagaatttgttttttctcaactagg

SEQ ID NO: 5325 - DNA, 642 bp, Artificial; identical to SEQ ID NO: 5205
  Mutations within GlyA3B4 introduced by GmGlyA3B4_T03TALE nuclease

SEQ ID NO: 5326 - DNA, 668 bp, Artificial
  Mutations within GlyA3B4 introduced by GmGlyA3B4_T03TALE nuclease
gttcatgtacggttgcagatataaacgaagcatagcttatgtatgaggtgtaacaaaattggaaacaatagccatgcaaggtgaagaatgtcaccaactcagaaacccttcttcattgacgtgtccctcactcactctcctctcttcactataaatcgccactcttcgtgttctccacttcaccaactccttcaaacttattaacactttccttagttcaatatggggaagcccttcttcactctctctctttcttccctttgcttgctactcttgtcgagtgcatgctttgctattacctccagcaagttcgagtgccaactcaacaacctcaacgcgttggaacccgaccaccgcgttgagtccgaaggtggtcttattgaaacatggaactctcaacaccctgagctgcaatgcgccggtgtcactgtttccaaacgcaccctcaaccgcaacggcctccacttgccatcttactcaccttatccccaaatgatcattgtcgttcaaggtgcgtaatattagtaagagtatttatcagcttaacgtgataacaatatagtaatatgaaatatttattaaatttttataattaatctctgctagaaaatttgattaatcattttagtagaatttgtttttctcaactaggtttttaaaacaccaca

SEQ ID NO: 5327 - DNA, 632 bp, Artificial
  Mutations within GlyA3B4 introduced by GmGlyA3B4_T03TALE nuclease
gttcatgtacggttgcagatataaacgaagcatagcttatgtatgaggtgtaacaaaattggaaacaatagccatgcaaggtgaagaatgtcaccaactcagaaacccttcttcattgacgtgtccctcactcactctcctctcttcactataaatcgccactcttcgtgttctccacttcaccaactccttcaaacttattaacactttccttagttcaatatggggaagcccttcttcactctctctctttcttccctttgcttgctactcttgtcgagtgcatgctttgctattacctccaggagtgccaactcaacaacctcaacgcgttggaacccgaccaccgcgttgagtccgaaggtggtcttattgaaacatggaactctcaacaccctgagctgcaatgcgccggtgtcactgtttccaaacgcaccctcaaccgcaacggcctccacttgccatcttactcaccttatccccaaatgatcattgtcgttcaaggtgcgtaatattagtaagaagtatttatcagcttaacgtgataacaataatagtaatatgaaatatttattaaatttttataattaatctctgctagaaaatttgattaatcattttagtagaatttg

SEQ ID NO: 5328 - DNA, 608 bp, Artificial
  Mutations within GlyA3B4 introduced by GmGlyA3B4_T03TALE nuclease
gttcatgtacggttgcagatataaacgaagcatagcttatgtatgaggtgtaacaaaattggaaacaatagccatgcaaggtgaagaatgtcaccaactcagaaacccttcttcattgacgtgtccctcactcactctcctctcttcactataaatcgccactcttcgtgttctccacttcaccaactccttcaaacttattaacactttccttagttcaatatggggaagcccttcttcactctctctctttcttccctttgcttgctactcttgtcgagtgcatgctttgctattaaaacatggaactcactgagtccgaaggtggtcttattgaaacatggaactctcaacaccctgagctgcaatgcgccggtgtcactgtttccaaacgcaccctcaaccgcaacggcctccacttgccatcttactcaccttatccccaaatgatcattgtcgttcaaggtgcgtaatattagtaagaagtatttatcagcttaacgtgataacaataatagtaatatgaaatatttattaatttttataattaatctctgctagaaaatttgattaatcatttttagtagaatttgtttttctcaactagg

SEQ ID NO: 5329 - DNA, 636 bp, Artificial
  Mutations within GlyA3B4 introduced by GmGlyA3B4_T03TALE nuclease
gttcatgtacggttgcagatataaacgaagcatagcttatgtatgaggtgtaacaaaattggaaacaatagccatgcaaggtgaagaatgtcaccaactcagaaacccttcttcattgacgtgtccctcactcactctcctctcttcactataaatcgccactcttcgtgttctccacttcaccaactccttcaaacttattaacactttccttagttcaatatggggaagcccttcttcactctctctctttcttccctttgcttgctactcttgtcgagtgcatgctttgctattacctccagcaagttgtgccaactcaacaacctcaacgcgttggaacccgaccaccgcgttgagtccgaaggtggtcttattgaaacatggaactctcaacaccctgagctgcaatgcgccggtgtcactgtttccaaacgcaccctcaaccgcaacggcctccacttgccatcttactcaccttatccccaaatgatcattgtcgttcaaggtgcgtaatattagtaagaagtatttatcagcttaacgtgataacaataatagtaatatgaaatatttattaaatttttataattaatctctgctagaaaatttgattaatcattttagtagaatttg

SEQ ID NO: 5330 - DNA, 645 bp, Artificial
  Mutations within GlyA3B4 introduced by GmGlyA3B4_T03TALE nuclease
gttcatgtacggttgcagatataaacgaagcatagcttatgtatgaggtgtaacaaaattggaaacaatagccatgcaaggtgaagaatgtcaccaactcagaaacccttcttcattgacgtgtccctcactcactctcctctcttcactataaatcgccactcttcgtgttctccacttcaccaactccttcaaacttattaacactttccttagttcaatatggggaagcccttcttcactctctctctttcttccctttgcttgctactcttgtcgagtgcatgctttgctattacctccagcaagtgagtgccaactcaacaacctcaacgcgttggaacccgaccaccgcgttgagtccgaaggtggtcttattgaaacatggaactctcaacaccctgagctgcaatgcgccggtgtcactgtttccaaacgcaccctcaaccgcaacggcctccacttgccatcttactcaccttatccccaaatgatcattgtcgttcaaggtgcgtaatattagtaagaagtatttatcagcttaacgtgataacaatatagtaatatgaaatatttattaaatttttataattaatctctgctagaaaatttgattaatcattttagtagaatttgttttctcaa

SEQ ID NO: 5331 - DNA, 663 bp, Artificial
  Mutations within GlyA3B4 introduced by GmGlyA3B4_T03TALE nuclease
gttcatgtacggttgcagatataaacgaagcatagcttatgtatgaggtgtaacaaaattggaaacaatagccatgcaaggtgaagaatgtcaccaactcagaaacccttcttcattgacgtgtccctcactcactctcctctcttcactataaatcgccactcttcgtgttctccacttcaccaactccttcaaacttattaacactttccttagttcaatatggggaagcccttcttcactctctctctttcttccctttgcttgctactcttgtcgagtgcatgctttgctattacctccagcaagttgagtgccaactcaacaacctcaacgcgttggaacccgaccaccgcgttgagtccgaaggtggtcttattgaaacatggaactctcaacaccctgagctgcaatgcgccggtgtcactgtttccaaacgcaccctcaaccgcaacggcctccacttgccatcttactcaccttatccccaaatgatcattgtcgttcaaggtgcgtaatattagtaagaagtatttatcagcttaacgtgataacaatatagtaatatgaaatatttattaaatttttataattaatctctgctagaaaatttgattaatcattttagtagaatttgttttctcaactaggttttaaacacca

SEQ ID NO: 5332 - DNA, 648 bp, Artificial
  Mutations within GlyA3B4 introduced by GmGlyA3B4_T03TALE nuclease
gttcatgtacggttgcagatataaacgaagcatagcttatgtatgaggtgtaacaaaattggaaacaatagccatgcaaggtgaagaatgtcaccaactcagaaacccttcttcattgacgtgtccctcactcactctcctctcttcactataaatcgccactcttcgtgttctccacttcaccaactccttcaaacttattaacactttccttagttcaatatggggaagcccttcttcactctctctctttcttccctttgcttgctactcttgtcgagtgcatgctttgctattacctccagcaagttgagtgccaactcaacaacctcaacgcgttggaacccgaccaccgcgttgagtccgaaggtggtcttattgaaacatggaactctcaacaccctgagctgcaatgcgccggtgtcactgtttccaaacgcaccctcaaccgcaacggcctccacttgccatcttactcaccttatccccaaatgatcattgtcgttcaaggtgcgtaatattagtaagaagtatttatcagcttaacgtgataacaataatagtaatatgaaatatttattaaatttttataattaatctctgctagaaaatttgattaatcattttagtagaatttgttttctcaac

SEQ ID NO: 5333 - DNA, 636 bp, Artificial; identical to SEQ ID NO: 5104
  Mutations within GlyA3B4 introduced by GmGlyA3B4_T03TALE nuclease

SEQ ID NO: 5334 - DNA, 664 bp, Artificial
  Mutations within GlyA3B4 introduced by GmGlyA3B4_T03TALE nuclease
gttcatgtacggttgcagatataaacgaagcatagcttatgtatgaggtgtaacaaaattggaaacaatagccatgcaaggtgaagaatgtcaccaactcagaaacccttcttcattgacgtgtccctcactcactctcctctcttcactataaatcgccactcttcgtgttctccacttcaccaactccttcaaacttattaacactttccttagttcaatatggggaagcccttcttcactctctctctttcttccctttgcttgctactcttgtcgagtgcatgctttgctattacctccagcaacgagtgccaactcaacaacctcaacgcgttggaacccgaccaccgcgttgagtccgaaggtggtcttattgaaacatggaactctcaacaccctgagctgcaatgcgccggtgtcactgtttccaaacgcaccctcaaccgcaacggcctccacttgccatcttactcaccttatccccaaatgatcattgtcgttcaaggtgcgtaatattagtaagaagtatttatcagcttaacgtgataacaatatagtaatatgaaatatttattaaatttttataattaatctctgctagaaaatttgattaatcattttagtagaatttgtttttctcaactaggtttttaaaacacca

SEQ ID NO: 5335 - DNA, 634 bp, Artificial; identical to SEQ ID NO: 5169
  Mutations within GlyA3B4 introduced by GmGlyA3B4_T03TALE nuclease

SEQ ID NO: 5336 - DNA, 648 bp, Artificial
  Mutations within GlyA3B4 introduced by GmGlyA3B4_T03TALE nuclease
gttcatgtacggttgcagatataaacgaagcatagcttatgtatgaggtgtaacaaaattggaaacaatagccatgcaaggtgaagaatgtcaccaactcagaaacccttcttcattgacgtgtccctcactcactctcctctcttcactataaatcgccactcttcgtgttctccacttcaccaactccttcaaacttattaacactttccttagttcaatatggggaagcccttcttcactctctctctttcttccctttgcttgctactcttgtcgagtgcatgctttgctattacctccagcaagttcagtgccaactcaacaacctcaacgcgttggaacccgaccaccgcgttgagtccgaaggtggtcttattgaaacatggaactctcaacaccctgagctgcaatgcgccggtgtcactgtttccaaacgcaccctcaaccgcaacggcctccacttgccatcttactcaccttatccccaaatgatcattgtcgttcaaggtgcgtaatattagtaagaagtatttatcagcttaacgtgataacaataatagtaatatgaaatatttattaaatttttataattaatctctgctagaaaatttgattaatcattttagtagaatttgtttttctcaa

SEQ ID NO: 5337 - DNA, 657 bp, Artificial
  Mutations within GlyA3B4 introduced by GmGlyA3B4_T03TALE nuclease
gttcatgtacggttgcagatataaacgaagcatagcttatgtatgaggtgtaacaaaattggaaacaatagccatgcaaggtgaagaatgtcaccaactcagaaacccttcttcattgacgtgtccctcactcactctcctctcttcactataaatcgccactcttcgtgttctccacttcaccaactccttcaaacttattaacactttccttagttcaatatggggaagcccttcttcactctctctctttcttccctttgcttgctactcttgtcgagtgcatgctttgctattacctccagcaagttcgagtgccaactcaacaacctcaacgcgttggaacccgaccaccgcgttgagtccgaaggtggtcttattgaaacatggaactctcaacaccctgagctgcaatgcgccggtgtcactgtttccaaacgcaccctcaaccgcaacggcctccacttgccatcttactcaccttatccccaaatgatcattgtcgttcaaggtgcgtaatattagtaagaagtatttatcagcttaacgtgataacaataatagtaatatgaaatatttattaaatttttataattaatctctgctagaaaatttgattaatcattttagtagaatttgttttctcaactaggtttt

SEQ ID NO: 5338 - DNA, 637 bp, Artificial
  Mutations within GlyA3B4 introduced by GmGlyA3B4_T03TALE nuclease
gttcatgtacggttgcagatataaacgaagcatagcttatgtatgaggtgtaacaaaattggaaacaatagccatgcaaggtgaagaatgtcaccaactcagaaacccttcttcattgacgtgtccctcactcactctcctctcttcactataaatcgccactcttcgtgttctccacttcaccaactccttcaaacttattaacactttccttagttcaatatggggaagcccttcttcactctctctctttcttccctttgcttgctactcttgtcgagtgcatgctttgctattacctccagcaagttcaacgccaactcaacaacctcaacgcgttggaacccgaccaccgcgttgagtccgaaggtggtcttattgaaacatggaactctcaacaccctgagctgcaatgcgccggtgtcactgtttccaaacgcaccctcaaccgcaacggcctccacttgccatcttactcaccttatccccaaatgatcattgtcgttcaaggtgcgtaatattagtaagaagtatttatcagcttaacgtgataacaatatagtaatatgaaatatttattaaatttttataattaatctctgctagaaaatttgattaatcattttagtagaatttg

SEQ ID NO: 5339 - DNA, 642 bp, Artificial
  Mutations within GlyA3B4 introduced by GmGlyA3B4_T03TALE nuclease
gttcatgtacggttgcagatataaacgaagcatagcttatgtatgaggtgtaacaaaattggaaacaatagccatgcaaggtgaagaatgtcaccaactcagaaacccttcttcattgacgtgtccctcactcactctcctctcttcactataaatcgccactcttcgtgttctccacttcaccaactccttcaaacttattaacactttccttagttcaatatggggaagcccttcttcactctctctctttcttccctttgcttgctactcttgtcgagtgcatgctttgctattacctccagcaagttcaaactcaacaacctcaacgcgttggaacccgaccaccgcgttgagtccgaaggtggtcttattgaaacatggaactctcaacaccctgagctgcaatgcgccggtgtcactgtttccaaacgcaccctcaaccgcaacggcctccacttgccatcttactcaccttatccccaaatgatcattgtcgttcaaggtgcgtaatattagtaagaagtatttatcagcttaacgtgataacaatatagtaatatgaaatatttattaaatttttataattaatctctgctagaaaatttgattaatcattttagtagaatttgtttttctcaa

SEQ ID NO: 5340 - DNA, 638 bp, Artificial; identical to SEQ ID NO: 5139
  Mutations within GlyA3B4 introduced by GmGlyA3B4_T03TALE nuclease

SEQ ID NO: 5341 - DNA, 596 bp, Artificial
  Mutations within GlyA3B4 introduced by GmGlyA3B4_T03TALE nuclease
gttcatgtacggttgcagatataaacgaagcatagcttatgtatgaggtgtaacaaaattggaaacaatagccatgcaaggtgaagaatgtcaccaactcagaaacccttcttcattgacgtgtccctcactcactctcctctcttcactataaatcgccactcttcgtgttctccacttcaccaactccttcaaacttattaacactttccttagttcaatatggggaagcccttcttcactctctctctttcttccctttgcttgctactcttgtcgagtgcatgctttgctattacctccagcaagttcgaaggtggtcttattgaaacatggaactctcaacaccctgagctgcaatgcgccggtgtcactgtttccaaacgcaccctcaaccgcaacggcctccacttgccatcttactcaccttatccccaaatgatcattgtcgttcaaggtgcgtaatattagtaagaagtatttatcagcttaacgtgataacaatatagtaatatgaaatatttattaaattttttatattaatctctgctagaaaatttgattaatcatttttagtagaatttgtttttctcaac

SEQ ID NO: 5342 - DNA, 638 bp, Artificial; identical to SEQ ID NO: 5119
  Mutations within GlyA3B4 introduced by GmGlyA3B4_T03TALE nuclease

SEQ ID NO: 5343 - DNA, 652 bp, Artificial
  Mutations within GlyA3B4 introduced by GmGlyA3B4_T03TALE nuclease
gttcatgtacggttgcagatataaacgaagcatagcttatgtatgaggtgtaacaaaattggaaacaatagccatgcaaggtgaagaatgtcaccaactcagaaacccttcttcattgacgtgtccctcactcactctcctctcttcactataaatcgccactcttcgtgttctccacttcaccaactccttcaaacttattaacactttccttagttcaatatggggaagcccttcttcactctctctctttcttccctttgcttgctactcttgtcgagtgcatgctttgctattacctccagcaagttgccaactcaacaacctcaacgcgttggaacccgaccaccgcgttgagtccgaaggtggtcttattgaaacatggaactctcaacaccctgagctgcaatgcgccggtgtcactgtttccaaacgcaccctcaaccgcaacggcctccacttgccatcttactcaccttatccccaaatgatcattgtcgttcaaggtgcgtaatattagtaagaagtatttatcagcttaacgtgataacaataatagtaatatgaaatatttattaaatttttataattaatctctgctagaaaatttgattaatcattttagtagaatttgttttctcaactaggtttt

SEQ ID NO: 5344 - DNA, 654 bp, Artificial
  Mutations within GlyA3B4 introduced by GmGlyA3B4_T03TALE nuclease
gttcatgtacggttgcagatataaacgaagcatagcttatgtatgaggtgtaacaaaattggaaacaatagccatgcaaggtgaagaatgtcaccaactcagaaacccttcttcattgacgtgtccctcactcactctcctctcttcactataaatcgccactcttcgtgttctccacttcaccaactccttcaaacttattaacactttccttagttcaatatggggaagcccttcttcactctctctctttcttccctttgcttgctactcttgtcgagtgcatgctttgctattacctccagcaagttcgagtgccaacctacaacaacctcaacagcgttggaacccgaccaccgcgttgagtccgaaggtggtcttattgaaacatggaactctcaacaccctgagctgcaatgcgccggtgtcactgtttccaaacgcaccctcaaccgcaacggcctccacttgccatcttactcaccttatccccaaatgatcattgtcgttcaaggtgcgtaatattagtaagagtatttatcagcttaacgtgataacaatatagtaatatgaaatatttattaaatttttataattaatctctgctagaaaatttgattaatcattttagtagaatttgttttctcaactagg

SEQ ID NO: 5345 - DNA, 483 bp, Artificial
  Mutations within GlyA3B4 introduced by GmGlyA3B4_T03TALE nuclease
gttcatgtacggttgcagatataaacgaagcatagcttatgtatgaggtgtaacaaaattggaaacaatagccatgcaaggtgaagaatgtcaccaactcagaaacccttcttcattgacgtgtccctcactcactctcctctcttcactataaatcgccactcttcgtgttctccacttcaccaactccttcaaacttattaacactttccttagttcaatatggggaagcccttcttcactctctctctttcttccctttgcttgctactcttgtcgagtgcatgctttgctattacctctcaacaccctgagctgcaatgcgccggtgtcactgtttccaaacgcaccctcaaccgcaacggcctccacttgccatcttactcaccttatccccaaaatgatcattgtcgttcaaggtgcgtaatattagtaagaagtatttatcagcttaacgtgataacaataatagtaatatgaaat

SEQ ID NO: 5346 - DNA, 603 bp, Artificial
  Mutations within GlyA3B4 introduced by GmGlyA3B4_T03TALE nuclease
gttcatgtacggttgcagatataaacgaagcatagcttatgtatgaggtgtaacaaaattggaaacaatagccatgcaaggtgaagaatgtcaccaactcagaaacccttcttcattgacgtgtccctcactcactctcctctcttcactataaatcgccactcttcgtgttctccacttcaccaactccttcaaacttattaacactttccttagttcaatatggggaagcccttcttcactctctctctttcttccctttgcttgctactcttgtcgagtgcatgctttgctattacctccagcaagagtgccaactcaacaacctcaacgcgttggaacccgaccaccgcgttgagtccgaaggtggtcttattgaaacatggaactctcaacaccctgagctgcaatgcgccggtgtcactgtttccaaacgcaccctcaaccgcaacggcctccacttgccatcttactcaccttatccccaaatgatcattgtcgttcaaggtgcgtaatattagtaagaagtatttatcagcttaacgtgataacaatatagtaatatgaaatatttattaaatttttataattaatctctgctag

SEQ ID NO: 5347 - DNA, 647 bp, Artificial; identical to SEQ ID NO: 5103
  Mutations within GlyA3B4 introduced by GmGlyA3B4_T03TALE nuclease

SEQ ID NO: 5348 - DNA, 662 bp, Artificial
  Mutations within GlyA3B4 introduced by GmGlyA3B4_T03TALE nuclease
gttcatgtacggttgcagatataaacgaagcatagcttatgtatgaggtgtaacaaaattggaaacaatagccatgcaaggtgaagaatgtcaccaactcagaaacccttcttcattgacgtgtccctcactcactctcctctcttcactataaatcgccactcttcgtgttctccacttcaccaactccttcaaacttattaacactttccttagttcaatatggggaagcccttcttcactctctctctttcttccctttgcttgctactcttgtcgagtgcatgctttgctattacctccagcaagactcaacaacctcaacgcgttggaacccgaccacctgcagttgcagtccgaacggtggtcttattgaaacatggaactctcaacaccctgagcctgcaatgcgccggtgtcactgtttccaaacgcaccctcaaccgcaacggcctccacttgccatcttactcaccttatccccaaatgatcattgtcgttcaaggtgcgtaatattagtaagaagtatttatcagcttaacgtgataacaataatagtaatatgaaatatttattaaatttttataattaatctctgctagaaaatttgattaatcatttttagtagaatttgtttttctcaactaggtttttaaacacca

SEQ ID NO: 5349 - DNA, 637 bp, Artificial
  Mutations within GlyA3B4 introduced by GmGlyA3B4_T03TALE nuclease
gttcatgtacggttgcagatataaacgaagcatagcttatgtatgaggtgtaacaaaattggaaacaatagccatgcaaggtgaagaatgtcaccaactcagaaacccttcttcattgacgtgtccctcactcactctcctctcttcactataaatcgccactcttcgtgttctccacttcaccaactccttcaaacttattaacactttccttagttcaatatggggaagcccttcttcactctctctctttcttccctttgcttgctactcttgtcgagtgcatgctttgctattacctccagcaagttcgtgccaactcaacaacctcaacgcgttggaacccgaccaccgcgttgagtccgaaggtggtcttattgaaacatggaactctcaacaccctgagctgcaatgcgccggtgtcactgtttccaaacgcaccctcaaccgcaacggcctccacttgccatcttactcaccttatccccaaatgatcattgtcgttcaaggtgcgtaatattagtaagaagtatttatcagcttaacgtgataacaatatagtaatatgaatatttattaaatttttataatttaatctctgctagaaatttgattaatcaatttttagtagaatttt

SEQ ID NO: 5350 - DNA, 661 bp, Artificial
  Mutations within GlyA3B4 introduced by GmGlyA3B4_T03TALE nuclease
gttcatgtacggttgcagatataaacgaagcatagcttatgtatgaggtgtaacaaaattggaaacaatagccatgcaaggtgaagaatgtcaccaactcagaaacccttcttcattgacgtgtccctcactcactctcctctcttcactataaatcgccactcttcgtgttctccacttcaccaactccttcaaacttattaacactttccttagttcaatatggggaagcccttcttcactctctctctttcttccctttgcttgctactcttgtcgagtgcatgctttgctattacctccagcaagttcaacaactcaacaacctcaacgcgttggaacccgaccaccgcgttgagtccgaaggtggtcttattgaaacatggaactctcaacaccctgagctgcaatgcgccggtgtcactgtttccaaacgcaccctcaaccgcaacggcctccacttgccatcttactcaccttatccccaaatgatcattgtcgttcaaggtgcgtaatattagtaagaagtatttatcagcttaacgtgataacaataatagtaatatgaaatatttattaaatttttataattaatctctgctagaaaatttgattaatcattttagtagaatttgttttctcaactaggttttaaacacca

SEQ ID NO: 5351 - DNA, 441 bp, Artificial
  Mutations within GlyA3B4 introduced by GmGlyA3B4_T03TALE nuclease
gttcatgtacggttgcagatataaacgaagcatagcttatgtatgaggtgtaacaaaattggaaacaatagccatgcaaggtgaagaatgtcaccaactcagaaacccttcttcattgacgtgtccctcactcactctccgcgttgagtccgaaggtggtcttattgaaacatggaactctcaacaccctgagctgcaatgcgccggtgtcactgtttccaaacgcaccctcaaccgcaacggcctccacttgccatcttactcaccttatccccaaatgatcattgtcgttcaaggtgcgtaatattagtaagaagtatttatcagcttaacgtgataacaataatagtaatatgaaatatttattaaattttttataattaatctctgctagaaaatttgattaatcatttttagtagaatttgtttttctcaactagg

SEQ ID NO: 5352 - DNA, 657 bp, Artificial
  Mutations within GlyA3B4 introduced by GmGlyA3B4_T03TALE nuclease
gttcatgtacggttgcagatataaacgaagcatagcttatgtatgaggtgtaacaaaattggaaacaatagccatgcaaggtgaagaatgtcaccaactcagaaacccttcttcattgacgtgtccctcactcactctcctctcttcactataaatcgccactcttcgtgttctccacttcaccaactccttcaaacttattaacactttccttagttcaatatggggaagcccttcttcactctctctctttcttccctttgcttgctactcttgtcgagtgcatgctttgctattacctccagcaaggagtgccaactcaacaacctcaacgcgttggaacccgaccaccgcgttgagtccgaaggtggtcttattgaaacatggaactctcaacaccctgagctgcaatgcgccggtgtcactgtttccaaacgcaccctcaaccgcaacggcctccacttgccatcttactcaccttatccccaaatgatcattgtcgttcaaggtgcgtaatattagtaagaagtatttatcagcttaacgtgataacaatatagtaatatgaaatatttattaaatttttataattaatctctgctagaaaatttgattaatcattttagtagaatttgttttctcaactaggttttaaaa

SEQ ID NO: 5353 - DNA, 643 bp, Artificial
  Mutations within GlyA3B4 introduced by GmGlyA3B4_T03TALE nuclease
gttcatgtacggttgcagatataaacgaagcatagcttatgtatgaggtgtaacaaaattggaaacaatagccatgcaaggtgaagaatgtcaccaactcagaaacccttcttcattgacgtgtccctcactcactctcctctcttcactataaatcgccactcttcgtgttctccacttcaccaactccttcaaacttattaacactttccttagttcaatatggggaagcccttcttcactctctctctttcttccctttgcttgctactcttgtcgagtgcatgctttgctattacctccagcaagtttgccaactcaacaacctcaacgcgttggaacccgaccaccgcgttgagtccgaaggtggtcttattgaaacatggaactctcaacaccctgagctgcaatgcgccggtgtcactgtttccaaacgcaccctcaaccgcaacggcctccacttgccatcttactcaccttatccccaaatgatcattgtcgttcaaggtgcgtaatattagtaagaagtatttatcagcttaacgtgataacaatatagtaatatgaaatatttattaaatttttataattaatctctgctagaaaatttgattaatcattttagtagaatttgttttctcaa

SEQ ID NO: 5354 - DNA, 620 bp, Artificial
  Mutations within GlyA3B4 introduced by GmGlyA3B4_T03TALE nuclease
gttcatgtacggttgcagatataaacgaagcatagcttatgtatgaggtgtaacaaaattggaaacaatagccatgcaaggtgaagaatgtcaccaactcagaaaccccttcttcattgacgtgtccctcactcactctcctctcttcactataaatcgccactcttcgtgttctccacttcaccaactccttcaaacttattaacactttccttagttcaatatggggaagcccttcttcactctctctctttcttccctttgcttgctactcttgtcgagtgcatgctttgctattacctccagcaaagtgccaactcaacaacctcaacgcgttggaacccgaccaccgcgttgagtccgaaggtggtcttattgaaacatggaactctcaacaccctgagctgcaatgcgccggtgtcactgtttccaaacgcaccctcaaccgcaacggcctccacttgccatcttactcaccttatccccaaatgatcattgtcgttcaaggtgcgtaatattagtaagaagtatttatcagcttaacgtgataacaataatagtaatatgaaatatttattaaatttttataattaatctctgctagaaaatttgattaatca

SEQ ID NO: 5355 - DNA, 661 bp, Artificial
  Mutations within GlyA3B4 introduced by GmGlyA3B4_T03TALE nuclease
gttcatgtacggttgcagatataaacgaagcatagcttatgtatgaggtgtaacaaaattggaaacaatagccatgcaaggtgaagaatgtcaccaactcagaaacccttcttcattgacgtgtccctcactcactctcctctcttcactataaatcgccactcttcgtgttctccacttcaccaactccttcaaacttattaacactttccttagttcaatatggggaagcccttcttcactctctctctttcttccctttgcttgctactcttgtcgagtgcatgctttgctattacctccagcaaagtgccaactcaacaacctcaacgcgttggaacccgaccaccgcgttgagtccgaaggtggtcttattgaaacatggaactctcaacaccctgagctgcaatgcgccggtgtcactgtttccaaacgcaccctcaaccgcaacggcctccacttgccatcttactcaccttatccccaaatgatcattgtcgttcaaggtgcgtaatattagtaagaagtatttatcagcttaacgtgataacaatatagtaatatgaaatatttattaaatttttataattaatctctgctagaaaatttgattaatcattttagtagaatttgttttctcaactaggtttttaaaacacca

SEQ ID NO: 5356 - DNA, 634 bp, Artificial; identical to SEQ ID NO: 5169
  Mutations within GlyA3B4 introduced by GmGlyA3B4_T03TALE nuclease

SEQ ID NO: 5357 - DNA, 662 bp, Artificial
  Mutations within GlyA3B4 introduced by GmGlyA3B4_T03TALE nuclease
gttcatgtacggttgcagatataaacgaagcatagcttatgtatgaggtgtaacaaaattggaaacaatagccatgcaaggtgaagaatgtcaccaactcagaaacccttcttcattgacgtgtccctcactcactctcctctcttcactataaatcgccactcttcgtgttctccacttcaccaactccttcaaacttattaacactttccttagttcaatatggggaagcccttcttcactctctctctttcttccctttgcttgctactcttgtcgagtgcatgctttgctattacctccagcaagttgccaactcaacaacctcaacgcgttggaacccgaccaccgcgttgagtccgaaggtggtcttattgaaacatggaactctcaacaccctgagctgcaatgcgccggtgtcactgtttccaaacgcaccctcaaccgcaacggcctccacttgccatcttactcaccttatccccaaatgatcattgtcgttcaaggtgcgtaatattagtaagaagtatttatcagcttaacgtgataacaataatagtaatatgaaatatttattaaatttttataattaatctctgctagaaaatttgattaatcattttagtagaatttgttttctcaactaggtttttaaaacacca

SEQ ID NO: 5358 - DNA, 558 bp, Artificial
  Mutations within GlyA3B4 introduced by GmGlyA3B4_T03TALE nuclease
gttcatgtacggttgcagatataaacgaagcatagcttatgtatgaggtgtaacaaaattggaaacaatagccatgcaaggtgaagaatgtcaccaactcagaaacccttcttcattgacgtgtccctcactcactctcctctcttcactataaatcgccactcttcgtgttctccacttcaccaactccttcaaacttattaacactttccttagttcaatatggggaagcccttcttcactctctctctttcttccctttgcttgctactcttgtcgagtgcatgctttgctattacctccagcaagttgagtccgaaggtggtcttattgaaacatggaactctcaacaccctgagctgcaatgcgccggtgtcactgtttccaaacgcaccctcaaccgcaacggcctccacttgccatcttactcaccttatccccaaatgatcattgtcgttcaaggtgcgtaatattagtaagaagtatttatcagcttaacgtgataacaataatagtaatatgaaatatttattaatttttataattaatctctgctag

SEQ ID NO: 5359 - DNA, 638 bp, Artificial; identical to SEQ ID NO: 5184
  Mutations within GlyA3B4 introduced by GmGlyA3B4_T03TALE nuclease
  misc_feature (532): n is a or c or t or g

SEQ ID NO: 5360 - DNA, 626 bp, Artificial; identical to SEQ ID NO: 4904
  Mutations within GlyA3B4 introduced by GmGlyA3B4_T03TALE nuclease

SEQ ID NO: 5361 - DNA, 658 bp, Artificial
  Mutations within GlyA3B4 introduced by GmGlyA3B4_T03TALE nuclease
gttcatgtacggttgcagatataaacgaagcatagcttatgtatgaggtgtaacaaaattggaaacaatagccatgcaaggtgaagaatgtcaccaactcagaaacccttcttcattgacgtgtccctcactcactctcctctcttcactataaatcgccactcttcgtgttctccacttcaccaactccttcaaacttattaacactttccttagttcaatatggggaagcccttcttcactctctctctttcttccctttgcttgctactcttgtcgagtgcatgctttgctattacctccagcaagttcaacaacctcaacgcgttggaacccgaccaccgcgttgagtccgaaggtggtcttattgaaacatggaactctcaacacctgagctgcaatgcgccggtgtcactgtttccaaacgcacctcaaccgcaacggcctccacttgccatcttactcaccttatccccaaatgatcattgtcgttcaaggtgcgtaatattagtaagaagtatttatcagctttaacgtgataacaataatagtaatatgaaatatttattaaattttttataattaatctctgctagaaaatttgattaatcatttttagtagaatttgttttttctcaactaggttttaaaacaccac

SEQ ID NO: 5362 - DNA, 663 bp, Artificial
  Mutations within GlyA3B4 introduced by GmGlyA3B4_T03TALE nuclease
gttcatgtacggttgcagatataaacgaagcatagcttatgtatgaggtgtaacaaaattggaaacaatagccatgcaaggtgaagaatgtcaccaactcagaaacccttcttcattgacgtgtccctcactcactctcctctcttcactataaatcgccactcttcgtgttctccacttcaccaactccttcaaacttattaacactttccttagttcaatatggggaagcccttcttcactctctctctttcttccctttgcttgctactcttgtcgagtgcatgctttgctattacctccagcaagtgagtgccaactcaacaacctcaacgcgttggaacccgaccaccgcgttgagtccgaaggtggtcttattgaaacatggaactctcaacaccctgagctgcaatgcgccggtgtcactgtttccaaacgcaccctcaaccgcaacggcctccacttgccatcttactcaccttatccccaaatgatcattgtcgttcaaggtgcgtaatattagtaagaagtatttatcagcttaacgtgataacaatatagtaatatgaaatatttattaaatttttataattaatctctgctagaaaatttgattaatcattttagtagaatttgttttctcaactaggttttaaaacacca

SEQ ID NO: 5363 - DNA, 487 bp, Artificial
  Mutations within GlyA3B4 introduced by GmGlyA3B4_T03TALE nuclease
gttcatgtacggttgcagatataaacgaagcatagcttatgtatgaggtgtaacaaaattggaaacaatagccatgcaaggtgaagaatgtcaccaactcagaaacccttcttcattgacgtgtccctcactcactctcctctcttcactataaatcgccactcttcgtgttctccacttcaccaactccttcaaacttattaacactttccttagttcaatatggggaagcccttcttcactctctctctttcttccctttgcttgctactcttgtcgagtgcatgctttgctattacctctcaacaccctgagctgcaatgcgccggtgtcactgtttccaaacgcaccctcaaccgcaacggcctccacttgccatcttactcaccttatccccaaatgatcattgtcgttcaaggtgcgtaatattagtaagaagtatttatcagcttaacgtgataacaataatagtaatatgaaatattta

SEQ ID NO: 5364 - DNA, 648 bp, Artificial
  Mutations within GlyA3B4 introduced by GmGlyA3B4_T03TALE nuclease
gttcatgtacggttgcagatataaacgaagcatagcttatgtatgaggtgtaacaaaattggaaacaatagccatgcaaggtgaagaatgtcaccaactcagaaacccttcttcattgacgtgtccctcactcactctcctctcttcactataaatcgccactcttcgtgttctccacttcaccaactccttcaaacttattaacactttccttagttcaatatggggaagcccttcttcactctctctctttcttccctttgcttgctactcttgtcgagtgcatgctttgctattacctccagcaagtgccaactcaacaacctcaacgcgttggaacccgaccaccgcgttgagtccgaaggtggtcttattgaaacatggaactctcaacaccctgagctgcaatgcgccggtgtcactgtttccaaacgcaccctcaaccgcaacggcctccacttgccatcttactcaccttatccccaaatgatcattgtcgttcaaggtgcgtaatattagtaagaagtatttatcagcttaacgtgataacaataatagtaatatgaaatatttattaaatttttataattaatctctgctagaaaatttgattaatcattttagtagaatttgtttttctcaactagg

SEQ ID NO: 5365 - DNA, 588 bp, Artificial
  Mutations within GlyA3B4 introduced by GmGlyA3B4_T03TALE nuclease
gttcatgtacggttgcagatataaacgaagcatagcttatgtatgaggtgtaacaaaattggaaacaatagccatgcaaggtgaagaatgtcaccaactcagaaacccttcttcattgacgtgtccctcactcactctcctctcttcactataaatcgccactcttcgtgttctccacttcaccaactccttcaaacttattaacactttccttagttcaatatggggaagcccttcttcactctctctctttcttccctttgcttgctactcttgtcgagtgcatgctttgctattacctccagcaagttgccaactcaacaacctcaacgcgttggaacccgaccaccgcgttgagtccgaaggtggtcttattgaaacatggaactctcaacaccctgagctgcaatgcgccggtgtcactgtttccaaacgcaccctcaaccgcaacggcctccacttgccatcttactcaccttatccccaaatgatcattgtcgttcaaggtgcgtaatattagtaagaagtatttatcagcttaacgtgataacaatatagtaatatgaaatatttattaaatttttataa

SEQ ID NO: 5366 - DNA, 649 bp, Artificial
  Mutations within GlyA3B4 introduced by GmGlyA3B4_T03TALE nuclease
gttcatgtacggttgcagatataaacgaagcatagcttatgtatgaggtgtaacaaaattggaaacaatagccatgcaaggtgaagaatgtcaccaactcagaaacccttcttcattgacgtgtccctcactcactctcctctcttcactataaatcgccactcttcgtgttctccacttcaccaactccttcaaacttattaacactttccttagttcaatatggggaagcccttcttcactctctctctttcttccctttgcttgctactcttgtcgagtgcatgctttgctattacctccagcaactcaacaacctcaacgcgttggaacccgaccaccgcgttgagtccgaaggtggtcttattgaacatggactctcaacaccctgagctgcaatgcgccggtgtcactgtttccaacgcaccctcaaccgcaacggcctccacttgccatcttactcaccttatccccaaatgatcattgtcgttcaaggtgcgtaatattagtaagaagtatttatcagcttaacgtgatacaatatagtaatatgaaatatttattaaatttttataattaatctctgctagaaaatttgattaatcattttagtagaatttgtttttctcaactaggtttttaaacacca

SEQ ID NO: 5367 - DNA, 645 bp, Artificial; identical to SEQ ID NO: 5301
  Mutations within GlyA3B4 introduced by GmGlyA3B4_T03TALE nuclease

SEQ ID NO: 5368 - DNA, 648 bp, Artificial; identical to SEQ ID NO: 4974
  Mutations within GlyA3B4 introduced by GmGlyA3B4_T03TALE nuclease

SEQ ID NO: 5369 - DNA, 511 bp, Artificial
  Mutations within GlyA3B4 introduced by GmGlyA3B4_T03TALE nuclease
gttcatgtacggttgcagatataaacgaagcatagcttatgtatgaggtgtaacaaaattggaaacaatagccatgcaaggtgaagaatgtcaccaactcagaaacccttcttcattgacgtgtccctcactcactctcctctcttcactataaatcgccactcttcgtgttctccacttcaccaactccttcaaacttattaacactttccttagttcaatatggggaagcccttcttcactctctctctttcttccctttgcttgctactcttgtcgagtgcatgctttgctattacctccagcaagttcgcctccacttgccatcttactcaccttatccccaaatgatcattgtcgttcaaggtgcgtaatattagtaagaagtatttatcagcttaacgtgataacaataatagtaatatgaaatatttattaaattttttataattaatctctgctagaaaatttgattaatcatttttagtagaatttgtttttctcaactagg

SEQ ID NO: 5370 - DNA, 656 bp, Artificial
  Mutations within GlyA3B4 introduced by GmGlyA3B4_T03TALE nuclease
gttcatgtacggttgcagatataaacgaagcatagcttatgtatgaggtgtaacaaaattggaaacaatagccatgcaaggtgaagaatgtcaccaactcagaaacccttcttcattgacgtgtccctcactcactctcctctcttcactataaatcgccactcttcgtgttctccacttcaccaactccttcaaacttattaacactttccttagttcaatatggggaagcccttcttcactctctctctttcttccctttgcttgctactcttgtcgagtgcatgctttgctattacctccagcaagttctcaacaacctcaacgcgttggaacccgaccaccgcgttgagtccgaaggtggtcttattgaaacatggaactctcaacaccctgagctgcaatgcgccggtgtcactgtttccaaacgcaccctcaaccgcaacggcctccacttgccatcttactcaccttatccccaaatgatcattgtcgttcaaggtgcgtaatattagtaagaagtatttatcagcttaacgtgataacaataatagtaatatgaaatatttattaaatttttataattaatctctgctagaaaatttgattaatcattttagtagaatttgttttctcaactaggttttaaaacacca

SEQ ID NO: 5371 - DNA, 662 bp, Artificial
  Mutations within GlyA3B4 introduced by GmGlyA3B4_T03TALE nuclease
  misc_feature (529): n is a or c or t or g
gttcatgtacggttgcagatataaacgaagcatagcttatgtatgaggtgtaacaaaattggaaacaatagccatgcaaggtgaagaatgtcaccaactcagaaacccttcttcattgacgtgtccctcactcactctcctctcttcactataaatcgccactcttcgtgttctccacttcaccaactccttcaaacttattaacactttccttagttcaatatggggaagcccttcttcactctctctctttcttccctttgcttgctactcttgtcgagtgcatgctttgctattacctccagcaacgagtgccaactcaacaacctcaacgcgttggaacccgaccaccgcgttgagtccgaaggtggtcttattgaaacatggaactctcaacaccctgagctgcaatgcgccggtgtcactgtttccaaacgcaccctcaaccgcaacggcctccacttgccatcttactcaccttatccccaaatgatcattgtcgttcaaggtgcgtaatattagtaagagnatttatcagcttaacgtgataacaataatagtaatatgaaatatttattaaatttttataattaatctctgctagaaaatttgattaatcattttagtagaatttgttttctcaactaggttttaaaacacca

SEQ ID NO: 5372 - DNA, 642 bp, Artificial
  Mutations within GlyA3B4 introduced by GmGlyA3B4_T03TALE nuclease
gttcatgtacggttgcagatataaacgaagcatagcttatgtatgaggtgtaacaaaattggaaacaatagccatgcaaggtgaagaatgtcaccaactcagaaacccttcttcattgacgtgtccctcactcactctcctctcttcactataaatcgccactcttcgtgttctccacttcaccaactccttcaaacttattaacactttccttagttcaatatggggaagcccttcttcactctctctctttcttccctttgcttgctactcttgtcgagtgcatgctttgctattacctccagcaaactcaacaacctcaacgcgttggaacccgaccaccgcgttgagtccgaaggtggtcttattgaaacatggaactctcaacaccctgagctgcaatgcgccggtgtcactgtttccaaacgcaccctcaaccgcaacggcctccacttgccatcttactcaccttatccccaaatgatcattgtcgttcaaggtgcgtaatattagtaagaagtatttatcagcttaacgtgataacaataatagtaatatgaaatatttattaaatttttataattaatctctgctagaaaatttgattaatcattttagtagaatttgtttttctcaactagg

SEQ ID NO: 5373 - DNA, 658 bp, Artificial
  Mutations within GlyA3B4 introduced by GmGlyA3B4_T03TALE nuclease
gttcatgtacggttgcagatataaacgaagcatagcttatgtatgaggtgtaacaaaattggaaacaatagccatgcaaggtgaagaatgtcaccaactcagaaacccttcttcattgacgtgtccctcactcactctcctctcttcactataaatcgccactcttcgtgttctccacttcaccaactccttcaaacttattaacactttccttagttcaatatggggaagcccttcttcactctctctctttcttccctttgcttgctactcttgtcgagtgcatgctttgctattacctccagcaagttgtgccaactcaacaacctcaacgcgttggaacccgaccaccgcgttgagtccgaaggtggtcttattgaaacatggaactctcaacaccctgagctgcaatgcgccggtgtcactgtttccaaacgcaccctcaaccgcaacggcctccacttgccatcttactcaccttatccccaaatgatcattgtcgttcaaggtgcgtaatattagtaagaagtatttatcagcttaacgtgataacaataatagtaatatgaaatatttattaaatttttataattaatctctgctagaaaatttgattaatcattttagtagaatttgttttctcaactaggttttaaaa

SEQ ID NO: 5374 - DNA, 538 bp, Artificial
  Mutations within GlyA3B4 introduced by GmGlyA3B4_T03TALE nuclease
gttcatgtacggttgcagatataaacgaagcatagcttatgtatgaggtgtaacaaaattggaaacaatagccatgcaaggtgaagaatgtcaccaactcagaaacccttcttcattgacgtgtccctcactcactctcctctcttcactataaatcgccactcttcgtgttctccacttcacctcactttcgatcgatgaccacccttcaacaacctcaacgcgttggaacccgaccaccgcgttgagtccgaaggtggtcttattgaaacatggaactctcaacaccctgagctgcaatgcgccggtgtcactgtttccaaacgcaccctcaaccgcaacggcctccacttgccatcttactcaccttatccccaaatgatcattgtcgttcaaggtgcgtaatattagtaagaagtatttatcagcttaacgtgataacaataatagtaatatgaaatatttattaaattttttataattaatctctgctagaaaatttgattaatcatttttagtagaatttgtttttctcaac

SEQ ID NO: 5375 - DNA, 646 bp, Artificial
  Mutations within GlyA3B4 introduced by GmGlyA3B4_T03TALE nuclease
gttcatgtacggttgcagatataaacgaagcatagcttatgtatgaggtgtaacaaaattggaaacaatagccatgcaaggtgaagaatgtcaccaactcagaaacccttcttcattgacgtgtccctcactcactctcctctcttcactataaatcgccactcttcgtgttctccacttcaccaactccttcaaacttattaacactttccttagttcaatatggggaagcccttcttcactctctctctttcttccctttgcttgctactcttgtcgagtgcatgctttgctattacctccagcaagttcaacaacctcaacgcgttggaacccgaccaccgcgttgagtccgaaggtggtcttattgaaacatggaactctcaacaccctgagctgcaatgcgccggtgtcactgtttccaaacgcaccctcaaccgcaacggcctccacttgccatcttactcaccttatcccccaaatgatcattgtcgttcaaggtgcgtaatattagtaagaagtatttatcagcttaacgtgataacaataatagtaatatgaaatatttattaaattttttataattaatctctgctagaaaatttgattaatcatttttagtagaatttgttttttctcaactagg

SEQ ID NO: 5376 - DNA, 653 bp, Artificial
  Mutations within GlyA3B4 introduced by GmGlyA3B4_T03TALE nuclease
gttcatgtacggttgcagatataaacgaagcatagcttatgtatgaggtgtaacaaaattggaaacaatagccatgcaaggtgaagaatgtcaccaactcagaaacccttcttcattgacgtgtccctcactcactctcctctcttcactataaatcgccactcttcgtgttctccacttcaccaactccttcaaacttattaacactttccttagttcaatatggggaagcccttcttcactctctctctttcttccctttgcttgctactcttgtcgagtgcatgctttgctattacctccagcaagttctgccaactcaacaacctcaacgcgttggaacccgaccaccgcgttgagtccgaaggtggtcttattgaaacatggaactctcaacaccctgagctgcaatgcgccggtgtcactgtttccaaacgcaccctcaaccgcaacggcctccacttgccatcttactcaccttatccccaaatgatcattgtcgttcaaggtgcgtaatattagtaagaagtatttatcagcttaacgtgataacaataatagtaatatgaaatatttattaaatttttataattaatctctgctagaaaatttgattaatcattttagtagaatttgttttctcaactaggttt

SEQ ID NO: 5377 - DNA, 545 bp, Artificial
  Mutations within GlyA3B4 introduced by GmGlyA3B4_T03TALE nuclease
gttcatgtacggttgcagatataaacgaagcatagcttatgtatgaggtgtaacaaaattggaaacaatagccatgcaaggtgaagaatgtcaccaactcagaaacccttcttcattgacgtgtccctcactcactctcctctcttcactataaatcgccactcttcgtgttctccacttcaccaactccttcaaacttattaacactttccttagttcaataagaccaccgcgttgagtccgaaggtggtcttattgaaacatggaactctcaacaccctgagctgcaatgcgccggtgtcactgtttccaaacgcaccctcaaccgcaacggcctccacttgccatcttactcaccttatccccaaatgatcattgtcgttcaaggtgcgtaatattagtaagaagtatttatcagcttaacgtgataacaataatagtaatatgaaatatttattaaattttttataattaatctctgctagaaaatttgattaatcatttttagtagaatttgttttttctcaactaggttttaaacacca

SEQ ID NO: 5378 - DNA, 440 bp, Artificial
  Mutations within GlyA3B4 introduced by GmGlyA3B4_T03TALE nuclease
gttcatgtacggttgcagatataaacgaagcatagcttatgtatgaggtgtaacaaaattggaaacaatagccatgcaaggtgaagaatgtcaccaactcagaaacccttcttcattgacgtgtccctcactcactctcctctcttcactataaatcgccactcttcgtgttctccacttcaccaactccttcaaacttattaacactttccttagttcaatatggggaagcccttcttcactctctctctttcttccctttgcttgctactcttgtcgagtgcatgctttgctattacctccagcaagtaagcttaacgtgataacaataatagtaatatgaaatatttattaaattttttataattaatctctgctagaaaatttgattaatcatttttagtagaattttgtttttctcaactaggttttaaacacca

SEQ ID NO: 5379 - DNA, 658 bp, Artificial
  Mutations within GlyA3B4 introduced by GmGlyA3B4_T03TALE nuclease
gttcatgtacggttgcagatataaacgaagcatagcttatgtatgaggtgtaacaaaattggaaacaatagccatgcaaggtgaagaatgtcaccaactcagaaacccttcttcattgacgtgtccctcactcactctcctctcttcactataaatcgccactcttcgtgttctccacttcaccaactccttcaaacttattaacactttccttagttcaatatggggaagcccttcttcactctctctctttcttccctttgcttgctactcttgtcgagtgcatgctttgctattacctccagcaagttcgagtgccaactcaacaacctcaacgcgttggaacccgaccaccgcgttgagtccgaaggtggtcttattgaaacatggaactctcaacaccctgagctgcaatgcgccggtgtcactgtttccaaacgcaccctcaaccgcaacggcctccacttgccatcttactcaccttatccccaaatgatcattgtcgttcaaggtgcgtaatattagtaagagtatttatcagcttaacgtgataacaataatagtaatatgaaatatttattaaatttttataattaatctctgctagaaaatttgattaatcattttagtagaatttgtttttctcaactaggttttt

SEQ ID NO: 5380 - DNA, 616 bp, Artificial
  Mutations within GlyA3B4 introduced by GmGlyA3B4_T03TALE nuclease
gttcatgtacggttgcagatataaacgaagcatagcttatgtatgaggtgtaacaaaattggaaacaatagccatgcaaggtgaagaatgtcaccaactcagaaacccttcttcattgacgtgtccctcactcactctcctctcttcactataaatcgccactcttcgtgttctccacttcaccaactccttcaaacttattaacactttccttagttcaatatggggaagcccttcttcactctctctctttcttccctttgcttgctactcttgtcgagtgcatgctttgctattacctccagcaagccaactcaacaacctcaacgcgttggaacccgaccaccgcgttgagtccgaaggtggtcttattgaaacatggaactctcaacaccctgagctgcaatgcgccggtgtcactgtttccaaacgcaccctcaaccgcaacggcctccacttgccatcttactcaccttatccccaaatgatcattgtcgttcaaggtgcgtaatattagtaagaagtatttatcagcttaacgtgataacaataatagtaatatgaaatatttattaaatttttataattaatctctgctagaaaatttgattaatca

SEQ ID NO: 5381 - DNA, 530 bp, Artificial
  Mutations within GlyA3B4 introduced by GmGlyA3B4_T03TALE nuclease
gttcatgtacggttgcagatataaacgaagcatagcttatgtatgaggtgtaacaaaattggaaacaatagccatgcaaggtgaagaatgtcaccaactcagaaacccttcttcattgacgtgtccctcactcactctcctctcttcactataaatcgccactcttcgtgttctccacttcaccaactccttcaaacttattaacactttcccgaccaccgcgttgagtccgaaggtggtcttattgaaacatggaactctcaacaccctgagctgcaatgcgccggtgtcactgtttccaaacgcaccctcaaccgcaacggcctccacttgccatcttactcaccttatccccaaatgatcattgtcgttcaaggtgcgtaatattagtaagaagtattttatcagcttaacgtgataacaataatagtaatatgaaatatttattaaattttttataattaatctctgctagaaaatttgattaatcatttttagtagaatttgtttttctcaactaggtttaaaca

SEQ ID NO: 5382 - DNA, 585 bp, Artificial
  Mutations within GlyA3B4 introduced by GmGlyA3B4_T03TALE nuclease
gttcatgtacggttgcagatataaacgaagcatagcttatgtatgaggtgtaacaaaattggaaacaatagccatgcaaggtgaagaatgtcaccaactcagaaacccttcttcattgacgtgtccctcactcactctcctctcttcactataaatcgccactcttcgtgttctccacttcaccaactccttcaaacttattaacactttccttagttcaatatggggaagcccttcttcactctctctctttcttccctttgcttgctactcttgtcgagtgcatgctttgccaactcaacaacctcaacgcgttggaacccgaccaccgcgttgagtccgaaggtggtcttattgaaacatggaactctcaacaccctgagctgcaatgcgccggtgtcactgtttccaaacgcaccctcaaccgcaacggcctccacttgccatcttactcaccttatccccaaatgatcattgtcgttcaaggtgcgtaatattagtaagaagtatttatcagcttaacgtgataacaataatagtaatatgaaatatttattaaattttttataattaattctctgctag

SEQ ID NO: 5383 - DNA, 667 bp, Artificial
  Mutations within GlyA3B4 introduced by GmGlyA3B4_T03TALE nuclease
gttcatgtacggttgcagatataaacgaagcatagcttatgtatgaggtgtaacaaaattggaaacaatagccatgcaaggtgaagaatgtcaccaactcagaaacccttcttcattgacgtgtccctcactcactctcctctcttcactataaatcgccactcttcgtgttctccacttcaccaactccttcaaacttattaacactttccttagttcaatatggggaagcccttcttcactctctctctttcttccctttgcttgctactcttgtcgagtgcatgctttgctattacctccagcaagttcgagtgccaactcaacaacctcaacgcgttggaacccgaccaccgcgttgagtccgaaggtggtcttattgaaacatggaactctcaacaccctgagctgcaatgcgccggtgtcactgtttccaaacgcaccctcaaccgcaacggcctccacttgccatcttactcaccttatccccaaatgatcattgtcgttcaaggtgcgtaatattagtaagagtatttatcagcttaacgtgataacaataatagtaatatgaaatatttattaaatttttataattaatctctgctagaaaatttgattaatcattttagtagaatttgttttctcaactaggttttaaaacaccaca

SEQ ID NO: 5384 - DNA, 622 bp, Artificial; identical to SEQ ID NO: 5075
  Mutations within GlyA3B4 introduced by GmGlyA3B4_T03TALE nuclease

SEQ ID NO: 5385 - DNA, 499 bp, Artificial; identical to SEQ ID NO: 4828
  Mutations within GlyA3B4 introduced by GmGlyA3B4_T03TALE nuclease

SEQ ID NO: 5386 - DNA, 612 bp, Artificial
  Mutations within GlyA3B4 introduced by GmGlyA3B4_T03TALE nuclease
gttcatgtacggttgcagatataaacgaagcatagcttatgtatgaggtgtaacaaaattggaaacaatagccatgcaaggtgaagaatgtcaccaactcagaaacccttcttcattgacgtgtccctcactcactctcctctcttcactataaatcgccactcttcgtgttctccacttcaccaactccttcaaacttattaacactttccttagttcaatatggggaagcccttcttcactctctctctttcttccctttgcttgctactcttgtcgagtgcatgctttgctattacctccagcaactcaacaacctcaacgcgttggaacccgaccaccgcgttgagtccgaaggtggtcttattgaaacatggaactctcaacaccctgagctgcaatgcgccggtgtcactgtttccaaacgcaccctcaaccgcaacggcctccacttgccatcttactcaccttatccccaaatgatcattgtcgttcaaggtgcgtaatattagtaagaagtatttatcagcttaacgtgataacaataatagtaatatgaaatatttattaaatttttataatttaatctctgctagaaaatttgattaatca

SEQ ID NO: 5387 - DNA, 646 bp, Artificial
  Mutations within GlyA3B4 introduced by GmGlyA3B4_T03TALE nuclease
gttcatgtacggttgcagatataaacgaagcatagcttatgtatgaggtgtaacaaaattggaaacaatagccatgcaaggtgaagaatgtcaccaactcagaaacccttcttcattgacgtgtccctcactcactctcctctcttcactataaatcgccactcttcgtgttctccacttcaccaactccttcaaacttattaacactttccttagttcaatatggggaagcccttcttcactctctctctttcttccctttgcttgctactcttgtcgagtgcatgctttgctattacctccagcaacaactcaacaacctcaacgcgttggaacccgaccaccgcgttgagtccgaaggtggtcttattgaaacatggaactctcaacaccctgagctgcaatgcgccggtgtcactgtttccaaacgcaccctcaaccgcaacggcctccacttgccatcttactcaccttatccccaaatgatcattgtcgttcaaggtgcgtaatattagtaagaagtatttatcagcttaacgtgataacaatatagtaatatgaaatatttattaaatttttataattaatctctgctagaaaatttgattaatcattttagtagaatttgttttctcaactaggtttt

SEQ ID NO: 5388 - DNA, 546 bp, Artificial
  Mutations within GlyA3B4 introduced by GmGlyA3B4_T03TALE nuclease
gttcatgtacggttgcagatataaacgaagcatagcttatgtatgaggtgtaacaaaattggaaacaatagccatgcaaggtgaagaatgtcaccaactcagaaacccttcttcattgacgtgtccctcactcactctcctctcttcactataaatcgccactcttcgtgttctccacttcaccaactccttcaaacttattaacactttccttagttcaataagaccaccgcgttgagtccgaaggtggtcttattgaaacatggaactctcaacaccctgagctgcaatgcgccggtgtcactgtttccaacgcaccctcaaccgcaacggcctccacttgccatcttactcaccttatccccaaatgatcattgtcgttcaaggtgcgtaatattagtaagaagtatttatcagcttaacgtgataacaataatagtaatatgaaatatttattaaattttttataattaatctctgctagaaaatttgattaatcatttttagtagaatttgttttttctcaactaggttttaaacaccaca

SEQ ID NO: 5389 - DNA, 664 bp, Artificial; identical to SEQ ID NO: 5123
  Mutations within GlyA3B4 introduced by GmGlyA3B4_T03TALE nuclease

SEQ ID NO: 5390 - DNA, 664 bp, Artificial; identical to SEQ ID NO: 4996
  Mutations within GlyA3B4 introduced by GmGlyA3B4_T03TALE nuclease

SEQ ID NO: 5391 - DNA, 658 bp, Artificial
  Mutations within GlyA3B4 introduced by GmGlyA3B4_T03TALE nuclease
  misc_feature (283): n is a or c or t or g
gttcatgtacggttgcagatataaacgaagcatagcttatgtatgaggtgtaacaaaattggaaacaatagccatgcaaggtgaagaatgtcaccaactcagaaacccttcttcattgacgtgtccctcactcactctcctctcttcactataaatcgccactcttcgtgttctccacttcaccaactccttcaaacttattaacactttccttagttcaatatggggaagcccttcttcactctctctctttcttccctttgcttgctactcttgctcgtgntgctttgctattacctccagcaagttcagtgccaactcaacaacctcaacgcgttggaacccgaccaccgcgttgagtccgaaggtggtcttattgaaacatggaactctcaacaccctgagctgcaatgcgccggtgtcactgtttccaaacgcaccctcaaccgcaacggcctccacttgccatcttactcaccttatccccaaatgatcattgtcgttcaaggtgcgtaatattagtaagaagtatttatcagcttaacgtgataacaataatagtaatatgaaatatttattaaatttttataattaatctctgctagaaaatttgattaatcattttagtagaatttgttttctcaactaggttttaaaa

SEQ ID NO: 5392 - DNA, 671 bp, Artificial
  Mutations within GlyA3B4 introduced by GmGlyA3B4_T03TALE nuclease
gttcatgtacggttgcagatataaacgaagcatagcttatgtatgaggtgtaacaaaaattggaaacaatagcccatgcaaggtgaagaatgtcaccaactcagaaacccttcttcattgacgtgtccctcactcactctcctctcttcactataaatcgccactcttcgtgttctccacttcaccaactccttcaaacttattaacactttccttagttcaatatggggaagcccttcttcactctctctctttcttcccttgcttgctactcttgtcgagtgcatgctttgctattacctccagcaagtgccaactcaacaacctcaacgcgttggaaccgaccaccgcgttgagtccgaaggtggtcttattgaaacatggaactctcaacaccctcgagcacttgcaaatgcgcccggtgttcactgtttccaaaacgcaccctcaccgcaacggcctccaacgcttgcccatctttgcaatcttacacccttatccccaaccaattcattgtcgttcaaggtgcgtaatattagtaagaagtatttatcagcttaacgtgataacaatatagtaatatgaaaatatttattaaatttttataattaatctctgctagaaaatttgattaatcttttagtagaatttgtttttctcaactaggtttt

SEQ ID NO: 5393 - DNA, 544 bp, Artificial
  Mutations within GlyA3B4 introduced by GmGlyA3B4_T03TALE nuclease
gttcatgtacggttgcagatataaacgaagcatagcttatgtatgaggtgtaacaaaattggaaacaatagccatgcaaggtgaagaatgtcaccaactcagaaacccttcttcattgacgtgtccctcactcactctcctctcttcactataaatcgccactcttcgtgttctccacttcaccaactccttcaaacttattaacactttccttagttcaatatgagtaagttggaacccgaccaccgcgttgagtccgaaggtggtcttattgaaacatggaactctcaacaccctgagctgcaatgcgccggtgtcactgtttccaaacgcaccctcaaccgcaacggcctccacttgccatcttactcaccttatcccccaaatgatcattgtcgttcaaggtgcgtaatattagtaagaagtatttatcagcttaacgtgataacaataatagtaatagaaatatttattaaattttttataattaatctctgctagaaaatttgattaatcatttttagtagaatttgtttttctcaac

SEQ ID NO: 5394 - DNA, 649 bp, Artificial
  Mutations within GlyA3B4 introduced by GmGlyA3B4_T03TALE nuclease
gttcatgtacggttgcagatataaacgaagcatagcttatgtatgaggtgtaacaaaattggaaacaatagccattgcaaggtgaagaatgtcaccaactcagaaacccttcttcattgacgtgtccctcactcactctcctctcttcactataaatcgccactcttcgtgttctccacttcaccaactccttcaaacttattaacactttccttagttcaatatggggaagcccttcttcactctctctctttcttccctttgcttgctactcttgtcgagtgcatgctttgctattacctccagcaagttgccaactcaacaacctcaacgcgttggaacccgaccaccgcgttgagtccgaaggtggtcttattgaaacatggaactctcaacaccctgagctgcaatgcgccggtgtcactgtttccaaacgcaccctcaaccgcaacggcctccacttgccatcttactcaccttatccccaaatgatcattgtcgttcaaggtgcgtaatattagtaagaagtatttatcagcttaacgtgataacaataatagtaatatgaaatatttattaaatttttataattaatctctgctagaaaatttgattaatcattttagtagaatttgttttctcaactagg

SEQ ID NO: 5395 - DNA, 635 bp, Artificial
  Mutations within GlyA3B4 introduced by GmGlyA3B4_T03TALE nuclease
gttcatgtacggttgcagatataaacgaagcatagcttatgtatgaggtgtaacaaaattggaaacaatagccatgcaaggtgaagaatgtcaccaactcagaaacccttcttcattgacgtgtccctcactcactctcctctcttcactataaatcgccactcttcgtgttctccacttcaccaactccttcaaacttattaacactttccttagttcaatatggggaagcccttcttcactctctctctttcttccctttgcttgctactcttgtcgagtgcatgctttgctattacctccagcaagttcaacgacgagtgccaactcaacaacctcaacgcgttggaacccgaccaccgcgttgagtccgaaggtggtcttattgaaacatggaactctcaacaccctgagctgcaatgcgccggtgtcactgtttccaaacgcaccctcaaccgcaacggcctccacttgccatcttactcaccttatccccaaatgatcattgtcgttcaaggtgcgtatattagtaagaagtatttatcagcttaacgtgataacaataatagtaatatgaaatattattaaattttttataattaaatctctgctagaaaattgattaatcattttag

SEQ ID NO: 5396 - DNA, 643 bp, Artificial; identical to SEQ ID NO: 4905
  Mutations within GlyA3B4 introduced by GmGlyA3B4_T03TALE nuclease

SEQ ID NO: 5397 - DNA, 658 bp, Artificial; identical to SEQ ID NO: 5133
  Mutations within GlyA3B4 introduced by GmGlyA3B4_T03TALE nuclease

SEQ ID NO: 5398 - DNA, 611 bp, Artificial
  Mutations within GlyA3B4 introduced by GmGlyA3B4_T03TALE nuclease
gttcatgtacggttgcagatataaacgaagcatagcttatgtatgaggtgtaacaaaattggaaacaatagccatgcaaggtgaagaatgtcaccaactcagaaacccttcttcattgacgtgtccctcactcactctcctctcttcactataaatcgccactcttcgtgttctccacttcaccaactccttcaaacttattaacactttccttagttcaatatggggaagcccttcttcactctctctctttcttccctttgcttgctactcttgtcgagtgcatgctttgctattacctccagcaagttgagtccgaaggtggtcttattgaaacatggaactctcaacaccctgagctgcaatgcgccggtgtcactgtttccaaacgcaccctcaaccgcaacggcctccacttgccatcttactcaccttatccccaaatgatcattgtcgttcaaggtgcgtaatattagtaagaagtatttatcagcttaacgtgataacaataatagtaatatgaatatttattaatttttataattaatctctgctagaaatttgattaatcatttttagtagaatttgtttttctcaactaggttttaaaa

SEQ ID NO: 5399 - DNA, 645 bp, Artificial; identical to SEQ ID NO: 5301
  Mutations within GlyA3B4 introduced by GmGlyA3B4_T03TALE nuclease

SEQ ID NO: 5400 - DNA, 645 bp, Artificial
  Mutations within GlyA3B4 introduced by GmGlyA3B4_T03TALE nuclease
gttcatgtacggttgcagatataaacgaagcatagcttatgtatgaggtgtaacaaaattggaaacaatagccatgcaaggtgaagaatgtcaccaactcagaaacccttcttcattgacgtgtccctcactcactctcctctcttcactataaatcgccactcttcgtgttctccacttcaccaactccttcaaacttattaacactttccttagttcaatatggggaagcccttcttcactctctctctttcttccctttgcttgctactcttgtcgagtgcatgctttgctattacctccagcaagtaagtgccaactcaacaacctcaacgcgttggaacccgaccaccgcgttgagtccgaaggtggtcttattgaaacatggaactctcaacaccctgagctgcaatgcgccggtgtcactgtttccaaacgcaccctcaaccgcaacggcctccacttgccatcttactcaccttatccccaaatgatcattgtcgttcaaggtgcgtaatattagtaagaagtatttatcagcttaacgtgataacaatatagtaatatgaaatatttattaaatttttataattaatctctgctagaaaatttgattaatcattttagtagaatttgttttctcaa

SEQ ID NO: 5401 - DNA, 664 bp, Artificial
  Mutations within GlyA3B4 introduced by GmGlyA3B4_T03TALE nuclease
gttcatgtacggttgcagatataaacgaagcatagcttatgtatgaggtgtaacaaaattggaaacaatagccatgcaaggtgaagaatgtcaccaactcagaaacccttcttcattgacgtgtccctcactcactctcctctcttcactataaatcgccactcttcgtgttctccacttcaccaactccttcaaacttattaacactttccttagttcaatatggggaagcccttcttcactctctctctttcttccctttgcttgctactcttgtcgagtgcatgctttgctattacctccagcaagtcgagtgccaactcaacaacctcaacgcgttggaacccgaccaccgcgttgagtccgaaggtggtcttattgaaacatggaactctcaacaccctgagctgcaatgcgccggtgtcactgtttccaaacgcaccctcaaccgcaacggcctccacttgccatcttactcaccttatccccaaatgatcattgtcgttcaaggtgcgtaatattagtaagagtatttatcagcttaacgtgataacaatatagtaatatgaaatatttattaaatttttataattaatctctgctagaaaatttgattaatcattttagtagaatttgttttctcaactaggttttaaacaccaca

SEQ ID NO: 5402 - DNA, 644 bp, Artificial
  Mutations within GlyA3B4 introduced by GmGlyA3B4_T03TALE nuclease
gttcatgtacggttgcagatataaacgaagcatagcttatgtatgaggtgtaacaaaattggaaacaatagccatgcaaggtgaagaatgtcaccaactcagaaacccttcttcattgacgtgtccctcactcactctcctctcttcactataaatcgccactcttcgtgttctccacttcaccaactccttcaaacttattaacactttccttagttcaatatggggaagcccttcttcactctctctctttcttccctttgcttgctactcttgtcgagtgcatgctttgctattacctccagcagccaactcaacaacctcaacgcgttggaacccgaccaccgcgttgagtccgaaggtggtcttattgaaacatggaactctcaacaccctgagctgcaatgcgccggtgtcactgtttccaaacgcaccctcaaccgcaacggcctccacttgccatcttactcaccttatccccaaatgatcattgtcgttcaaggtgcgtaatattagtaagaagtatttatcagcttaacgtgataacaataatagtaatatgaaatatttattaaatttttataattaatctctgctagaaaatttgattaatcattttagtagaatttgttttctcaactagg

SEQ ID NO: 5403 - DNA, 402 bp, Artificial
  Mutations within GlyA3B4 introduced by GmGlyA3B4_T03TALE nuclease
gttcatgtacggttgcagatataaacgaagcatagcttatgtatgaggtgtaacaaaattggaaacaatagccatgcaaggtgaagaatgtcaccaactcagaaacccttcttcattgacgtgtccctcactcactctcctctcttcactataaatcgccactcttcgtgttctccacttcaccaactccttcaaacttattaacactttccttagttcaatatggggaagcccttcttcactctctctctttcttccctttgcttgctactcttgtcgagtgcatgctttgctattacctccacttgccatcttactcaccttatccccaaatgatcattgtcgttcaaggtgcgtaatattagtaagaagtatttatcagcttaacgtgataacaataat

SEQ ID NO: 5404 - DNA, 618 bp, Artificial
  Mutations within GlyA3B4 introduced by GmGlyA3B4_T03TALE nuclease
gttcatgtacggttgcagatataaacgaagcatagcttatgtatgaggtgtaacaaaattggaaacaatagccatgcaaggtgaagaatgtcaccaactcagaaacccttcttcattgacgtgtccctcactcactctcctctcttcactataaatcgccactcttcgtgttctccacttcaccaactccttcaaacttattaacactttccttagttcaatatggggaagcccttcttcactctctctctttcttccctttgcttgctactcttgtcgagtgcatgctttgctattacctccagcaagtgccaactcaacaacctcaacgcgttggaacccgaccaccgcgttgagtccgaaggtggtcttattgaaacatggaactctcaacaccctgagctgcaatgcgccggtgtcactgtttccaaacgcaccctcaaccgcaacggcctccacttgccatcttactcaccttatccccaaatgatcattgtcgttcaaggtgcgtaatattagtaagaagtatttatcagcttaacgtgataacaataatagtaatatgaaatatttattaaatttttataattaatctctgctagaaaatttgattaatca

SEQ ID NO: 5405 - DNA, 614 bp, Artificial
  Mutations within GlyA3B4 introduced by GmGlyA3B4_T03TALE nuclease
gttcatgtacggttgcagatataaacgaagcatagcttatgtatgaggtgtaacaaaattggaaacaatagccatgcaaggtgaagaatgtcaccaactcagaaacccttcttcattgacgtgtccctcactcactctcctctcttcactataaatcgccactcttcgtgttctccacttcaccaactccttcaaacttattaacactttccttagttcaatatggggaagcccttcttcactctctctctttcttccctttgcttgctactcttgtcgagtgcatgctttgctattaaactcgaccaccgcgttgagtccgaaggtggtcttattgaaacatggaactctcaacaccctgagctgcaatgcgccggtgtcactgtttccaaacgcaccctcaaccgcaacggcctccacttgccatcttactcaccttatccccaaatgatcattgtcgttcaaggtgcgtaatattagtaagaagtatttatcagcttaacgtgataacaataatagtaatatgaaatatttattaattttttataattaatctctgctagaaatttgattaatcatttttagtagaatttgtttttctcaactaggttttt

SEQ ID NO: 5406 - DNA, 643 bp, Artificial
  Mutations within GlyA3B4 introduced by GmGlyA3B4_T03TALE nuclease
gttcatgtacggttgcagatataaacgaagcatagcttatgtatgaggtgtaacaaaattggaaacaatagccatgcaaggtgaagaatgtcaccaactcagaaacccttcttcattgacgtgtccctcactcactctcctctcttcactataaatcgccactcttcgtgttctccacttcaccaactccttcaaacttattaacactttccttagttcaatatggggaagcccttcttcactctctctctttcttccctttgcttgctactcttgtcgagtgcatgtgccaactcaacaacctcaacgcgttggaacccgaccaccgcgttgagtccgaaggtggtcttattgaaacatggaactctcaacaccctgagctgcaatgcgccggtgtcactgtttccaaacgcaccctcaaccgcaacggcctccacttgccatcttactcaccttatccccaaatgatcattgtcgttcaaggtgcgtaatattagtaagaagtatttatcagcttaacgtgataacaataatagtaatatgaaatatttattaaattttttataattaatctctgctagaaaatttgattaatcatttttagtagaatttgttttttctcaactaggttttaaacaccaca

SEQ ID NO: 5407 - DNA, 637 bp, Artificial
  Mutations within GlyA3B4 introduced by GmGlyA3B4_T03TALE nuclease
gttcatgtacggttgcagatataaacgaagcatagcttatgtatgaggtgtaacaaaattggaaacaatagccatgcaaggtgaagaatgtcaccaactcagaaacccttcttcattgacgtgtccctcactcactctcctctcttcactataaatcgccactcttcgtgttctccacttcaccaactccttcaaacttattaacactttccttagttcaatatggggaagcccttcttcactctctctctttcttccctttgcttgctactcttgtcgagtgcatgctttgctattacctccagcaagttagtgccaactcaacaacctcaacgcgttggaacccgaccaccgcgttgagtccgaaggtggtcttattgaaacatggaattctcaacaccctgagctgcaatgcgccggtgtcactgtttccaaacgcaccctcaaccgcaacggcctccacttgccatcttactcaccttatccccaaatgatcattgtcgttcaaggtgcgtaatattagtaagaagtatttatcagcttaacgtgataacaataatagtaatatgaaatatttattaaatttttataattaatctctgctagaaaatttgattaatcattttagtagaatttg

SEQ ID NO: 5408 - DNA, 634 bp, Artificial
  Mutations within GlyA3B4 introduced by GmGlyA3B4_T03TALE nuclease
gttcatgtacggttgcagatataaacgaagcatagcttatgtatgaggtgtaacaaaattggaaacaatagccatgcaaggtgaagaatgtcaccaactcagaaacccttcttcattgacgtgtccctcactcactctcctctcttcactataaatcgccactcttcgtgttctccacttcaccaactccttcaaacttattaacactttccttagttcaatatggggaagcccttcttcactctctctctttcttccctttgcttgctactcttgtcgagtgccaactcaacaacctcaacgcgttggaacccgaccaccgcgttgagtcccgaaggtggtcttattgaaacatggaactctcaacaccctgagctgcaatgcgccggtgtcactgttttccaaacgcaccctcaaccgcaacggcctccacttgccatcttactcaccttatccccaaatgatcattgtcgttcaaggtgcgtaatattagtaagaagtatttatcagcttaacgtgataacaataatagtaatatgaaatatttattaattttttataattaatctctgctagaaaatttgattaatcatttttagtagaatttgtttttctcaactaggtttttaaaaca

SEQ ID NO: 5409 - DNA, 499 bp, Artificial; identical to SEQ ID NO: 4828
  Mutations within GlyA3B4 introduced by GmGlyA3B4_T03TALE nuclease

SEQ ID NO: 5410 - DNA, 645 bp, Artificial
  Mutations within GlyA3B4 introduced by GmGlyA3B4_T03TALE nuclease
gttcatgtacggttgcagatataaacgaagcatagcttatgtatgaggtgtaacaaaattggaaacaatagccatgcaaggtgaagaatgtcaccaactcagaaacccttcttcattgacgtgtccctcactcactctcctctcttcactataaatcgccactcttcgtgttctccacttcaccaactccttcaaacttattaacactttccttagttcaatatggggaagcccttcttcactctctctctttcttccctttgcttgctactcttgtcgagtgcatgctttgctattacctccagcaagttgagtgccaactcaacaacctcaacgcgttggaacccgaccaccgcgttgagtccgaaggtggtcttattgaaacatggaactctcaacaccctgagctgcaatgcgccggtgtcactgtttccaaacgcaccctcaaccgcaacggcctccacttgccatcttactcaccttatccccaaatgatcattgtcgttcaaggtgcgtaatattagtaagaagtatttatcagcttaacgtgatacaatatagtaatatgaaatatttattaaatttttataattaatctctgctagaaaatttgattaatcattttagtagaatttgttttctcaa

SEQ ID NO: 5411 - DNA, 659 bp, Artificial
  Mutations within GlyA3B4 introduced by GmGlyA3B4_T03TALE nuclease
gttcatgtacggttgcagatataaacgaagcatagcttatgtatgaggtgtaacaaaattggaaacaatagccatgcaaggtgaagaatgtcaccaactcagaaacccttcttcattgacgtgtccctcactcactctcctctcttcactataaatcgccactcttcgtgttctccacttcaccaactccttcaaacttattaacactttccttagttcaatatggggaagcccttcttcactctctctctttcttccctttgcttgctactcttgtcgagtgcatgctttgctattacctccagcaatgccaactcaacaacctcaacgcgttggaacccgaccaccgcgttgagtccgaaggtggtcttattgaaacatggaactctcaacaccctgagctgcaatgcgccggtgtcactgtttccaaacgcaccctcaaccgcaacggcctccacttgccatcttactcaccttatccccaaatgatcattgtcgttcaaggtgcgtaatattagtaagaagtatttatcagcttaacgtgataacaataatagtaatatgaaatatttattaaatttttataattaatctctgctagaaaatttgattaatcattttagtagaatttgttttctcaactaggttttaaaacacca

SEQ ID NO: 5412 - DNA, 642 bp, Artificial
  Mutations within GlyA3B4 introduced by GmGlyA3B4_T03TALE nuclease
gttcatgtacggttgcagatataaacgaagcatagcttatgtatgaggtgtaacaaaattggaaacaatagccatgcaaggtgaagaaacccttcttcattgacgtgtccctcactcactctcctctcttcactataaatcgccactcttcgtgttctccacttcaccaactccttcaaacttattaacactttccttagttcaatatggggaagcccttcttcactctctctctttcttccctttgcttgctactcttgtcgagtgcatgctttgctattacctccagcaagtgccaactcaacaacctcaacgcgttggaacccgaccaccgcgttgagtccgaaggtggtcttattgaaacatggaactctcaacacccctgagctgcaatgcgccggtgtcactgttttccaaacgcaccctcaaccgcaacggcctccacttgccatcttactcaccttatccccaaatcgatcattgtcgttcaaggtgcgtaatattagtaagaagtatttatcagcttaacgtgataacaataatagtaatatgaaatatttattaaattttttataattaatctctgctagaaaatttgattaatcatttttagtagaatttgttttttctcaactaggtttt

SEQ ID NO: 5413 - DNA, 642 bp, Artificial; identical to SEQ ID NO: 5205
  Mutations within GlyA3B4 introduced by GmGlyA3B4_T03TALE nuclease

SEQ ID NO: 5414 - DNA, 637 bp, Artificial; identical to SEQ ID NO: 5203
  Mutations within GlyA3B4 introduced by GmGlyA3B4_T03TALE nuclease

SEQ ID NO: 5415 - DNA, 660 bp, Artificial
  Mutations within GlyA3B4 introduced by GmGlyA3B4_T03TALE nuclease
gttcatgtacggttgcagatataaacgaagcatagcttatgtatgaggtgtaacaaaattggaaacaatagccatgcaaggtgaagaatgtcaccaactcagaaacccttcttcattgacgtgtccctcactcactctcctctcttcactataaatcgccactcttcgtgttctccacttcaccaactccttcaaacttattaacactttccttagttcaatatggggaagcccttcttcactctctctctttcttccctttgcttgctactcttgtcgagtgcatgctttgctattacctccagcaagttgaatgccaactcaacaacctcaacgcgttggaacccgaccaccgcgttgagtccgaaggtggtcttattgaaacatggaactctcaacaccctgagctgcaatgcgccggtgtcactgtttccaaacgcaccctcaaccgcaacggcctccacttgccatcttactcaccttatccccaaatgatcattgtcgttcaaggtgcgtaatattagtaagaagtatttatcagcttaacgtgataacaataatagtaatatgaaatatttattaaatttttataattaatctctgctagaaaatttgattaatcattttagtagaatttgttttctcaactaggttttaaaa

SEQ ID NO: 5416 - DNA, 525 bp, Artificial
  Mutations within GlyA3B4 introduced by GmGlyA3B4_T03TALE nuclease
gttcatgtacggttgcagatataaacgaagcatagcttatgtatgaggtgtaacaaaattggaaacaatagccatgcaaggtgaagaatgtcaccaactcagaaacccttcttcattgacgtgtccctcactcactctcctctcttcactataaatcgccactcttcgtgttctccacttcaccaactccttcaaacttattaacactttccttagttcaataagaccaccgcgttgagtccgaaggtggtcttattgaaacatggaactctcaacaccctgagctgcaatgcgccggtgtcactgtttccaaacgcaccctcaaccgcaacggcctccacttgccatcttactcaccttatccccaaatgatcattgtcgttcaaggtgcgtaatattagtaagaagtatttatcagcttaacgtgataacaataatagtaatatgaaatatttattaaattttttataattaatctctgctagaaaatttgattaatcatttttagtagaatttgtttttctc

SEQ ID NO: 5417 - DNA, 626 bp, Artificial
  Mutations within GlyA3B4 introduced by GmGlyA3B4_T03TALE nuclease
gttcatgtacggttgcagatataaacgaagcatagcttatgtatgaggtgtaacaaaattggaaacaatagccatgcaaggtgaagaatgtcaccaactcagaaacccttcttcattgacgtgtccctcactcactctcctctcttcactataaatcgccactcttcgtgttctccacttcaccaactccttcaaacttattaacactttccttagttcaatatggggaagcccttcttcactctctctctttcttccctttgcttgctactcttgtcgagtgcatgctttgctattacctccagcaagttcaaagtgccaactcaacaacctcaacgcgttggaacccgaccaccgcgttgagtccgaaggtggtcttattgaaacatggaactctcaacaccctgagctgcaatgcgccggtgtcactgtttccaaacgcaccctcaaccgcaacggcctccacttgccatcttactcaccttatccccaaatgatcattgtcgttcaaggtgcgtaatattagtaagaagtatttatcagcttaacgtgataacaataatagtaatatgaaatatttattaaatttttataattaatctctgctagaaaatttgattaatcaa

SEQ ID NO: 5418 - DNA, 652 bp, Artificial
  Mutations within GlyA3B4 introduced by GmGlyA3B4_T03TALE nuclease
gttcatgtacggttgcagatataaacgaagcatagcttatgtatgaggtgtaacaaaattggaaacaatagccatgcaaggtgaagaatgtcaccaactcagaaacccttcttcattgacgtgtccctcactcactctcctctcttcactataaatcgccactcttcgtgttctccacttcaccaactccttcaaacttattaacactttccttagttcaatatggggaagcccttcttcactctctctctttcttccctttgcttgctactcttgtcgagtgcatgctttgctattacctccagcaagttcaaccaactcaacaacctcaacgcgttggaacccgaccaccgcgttgagtccgaaggtggtcttattgaaacatggaactctcaacaccctgagctgcaatgcgccggtgtcactgtttccaaacgcaccctcaaccgcaacggcctccacttgccatcttactcaccttatccccaaatgatcattgtcgttcaaggtgcgtaatattagtaagaagtatttatcagcttaacgtgataacaatatagtaatatgaaatatttattaaatttttataattaatctctgctagaaatttgattaatcattttagtagaatttgttttctcaactaggtttt

SEQ ID NO: 5419 - DNA, 663 bp, Artificial
  Mutations within GlyA3B4 introduced by GmGlyA3B4_T03TALE nuclease
gttcatgtacggttgcagatataaacgaagcatagcttatgtatgaggtgtaacaaaattggaaacaatagccatgcaaggtgaagaatgtcaccaactcagaaacccttcttcattgacgtgtccctcactcactctcctctcttcactataaatcgccactcttcgtgttctccacttcaccaactccttcaaacttattaacactttccttagttcaatatggggaagcccttcttcactctctctctttcttccctttgcttgctactcttgtcgagtgcatgctttgctattacctccagcaagttcgccaactcaacaacctcaacgcgttggaacccgaccaccgcgttgagtccgaaggtggtcttattgaaacatggaactctcaacaccctgagctgcaatgcgccggtgtcactgtttccaaacgcaccctcaaccgcaacggcctccacttgccatcttactcaccttatccccaaatgatcattgtcgttcaaggtgcgtaatattagtaagaagtatttatcagcttaacgtgataacaataatagtaatatgaaatatttattaaatttttataattaatctctgctagaaaatttgattaatcattttagtagaatttgtttttctcaactaggttttaaaacacca

SEQ ID NO: 5420 - DNA, 637 bp, Artificial
  Mutations within GlyA3B4 introduced by GmGlyA3B4_T03TALE nuclease
gttcatgtacggttgcagatataaacgaagcatagcttatgtatgaggtgtaacaaaattggaaacaatagccatgcaaggtgaagaatgtcaccaactcagaaacccttcttcattgacgtgtccctcactcactctcctctcttcactataaatcgccactcttcgtgttctccacttcaccaactccttcaaacttattaacactttccttagttcaatatggggaagcccttcttcactctctctctttcttccctttgcttgctactcttgtcgagtgcatgctttgccaactcaacaacctcaacgcgttggaacccgaccaccgcgttgagtccgaaggtggtcttattgaaacatggaactctcaacaccctgagctgcaatgcgccggtgtcactgtttccaaacgcaccctcaaccgcaacggcctccacttgccatcttactcaccttatcccccaaatgatcattgtcgttcaaggtgcgtaatattagtaagaagtatttatcagcttaacgtgataacaataatagtaatatgaaatatttattaaattttttataattaatctctgctagaaaatttgattaatcatttttagtagaatttgttttttctcaactaggtttt

SEQ ID NO: 5421 - DNA, 640 bp, Artificial
  Mutations within GlyA3B4 introduced by GmGlyA3B4_T03TALE nuclease
gttcatgtacggttgcagatataaacgaagcatagcttatgtatgaggtgtaacaaaattggaaacaatagccatgcaaggtgaagaatgtcaccaactcagaaacccttcttcattgacgtgtccctcactcactctcctctcttcactataaatcgccactcttcgtgttctccacttcaccaactccttcaaacttattaacactttccttagttcaatatggggaagcccttcttcactctctctctttcttccctttgcttgctactcttgtcgagtgcatgctttgctattacctccagagtgccaactcaacaacctcaacgcgttggaacccgaccaccgcgttgagtccgaaggtggtcttattgaaacatggaactctcaacaccctgagctgcaatgcgccggtgtcactgtttccaaacgcaccctcaaccgcaacggcctccacttgccatcttactcaccttatccccaaatgatcattgtcgttcaaggtgcgtaatattagtaagaagtatttatcagcttaacgtgataacaataatagtaatatgaaatatttattaaatttttataattaatctctgctagaaaatttgattaatcattttagtagaatttgttttctcaa

SEQ ID NO: 5422 - DNA, 580 bp, Artificial
  Mutations within GlyA3B4 introduced by GmGlyA3B4_T03TALE nuclease
gttcatgtacggttgcagatataaacgaagcatagcttatgtatgaggtgtaacaaaattggaaacaatagccatgcaaggtgaagaatgtcaccaactcagaaacccttcttcattgacgtgtccctcactcactctcctctcttcactataaatcgccactcttcgtgttctccacttcaccaactccttcaaacttattaacactttccttagttcaatatggggaagcccttcttcactctctctctttcttccctttgcttgctactcttgtcgagtgcatgctttgctattacctccagcaatattgaacatggaactctcaacaccctgagctgcaatgcgccggtgtcactgtttccaaacgcaccctcaaccgcaacggcctccacttgccatcttactcaccttatccccaaatgatcattgtcgttcaaggtgcgtaatattagtaagaagtatttatcagcttaacgtgataacaataatagtaatatgaatatttattaaattttttataattaatctctgctagaaaatttgattaatcatttttagtagaatttgtttttctcaa

SEQ ID NO: 5423 - DNA, 506 bp, Artificial
  Mutations within GlyA3B4 introduced by GmGlyA3B4_T03TALE nuclease
gttcatgtacggttgcagatataaacgaagcatagcttatgtatgaggtgtaacaaaattggaaacaatagccatgcaaggtgaagaatgtcaccaactcagaaacccttcttcattgacgtgtccctcactcactctcctctcttcaacgagtgccaactcaacaacctcaacgcgttggaacccgaccaccgcgttgagtccgaaggtggtcttattgaaacatggaactctcaacaccctgagctgcaatgcgccggtgtcactgtttccaaacgcaccctcaaccgcaacggcctccacttgccatcttactcaccttatccccaaatgatcattgtcgttcaaggtgcgtaatattagtaagaagtatttatcagcttaacgtgataacaataatagtaatatgaaatatttattaaattttttataattaatctctgctagaaaatttgattaatcatttttagtagaatttgtttttctcaactaggttttaaacacca

SEQ ID NO: 5424 - DNA, 469 bp, Artificial
  Mutations within GlyA3B4 introduced by GmGlyA3B4_T03TALE nuclease
gttcatgtacggttgcagatataaacgaagcatagcttatgtatgaggtgtaacaaaattggaaacaatagccatgcaaggtgaagaatgtcaccaactcagaaacccttcttcattgacgtgtccctcactcactctcctctcttcactataaatcgccactcttcgtgttctccacttcaccaactccttcaaacttattaacactttccttagttcaatatggggaagcccttcttcactctctctctttcttccctttgcttgctactcttgtcgagtgcatgctttgctattacctccagcaaagttgcatgccgaacgttcaacaagccctaccaatccgaccgaattggaacccctcaagcagcccagccttggcaagttgccaggatccccgaaaccgggtcgggtttgcattgatttgccaaagaacggattggggaacttcctttattcgaaaaaccaa

SEQ ID NO: 5425 - DNA, 619 bp, Artificial; identical to SEQ ID NO: 4921
  Mutations within GlyA3B4 introduced by GmGlyA3B4_T03TALE nuclease

SEQ ID NO: 5426 - DNA, 499 bp, Artificial; identical to SEQ ID NO: 4828
  Mutations within GlyA3B4 introduced by GmGlyA3B4_T03TALE nuclease

SEQ ID NO: 5427 - DNA, 663 bp, Artificial
  Mutations within GlyA3B4 introduced by GmGlyA3B4_T03TALE nuclease
gttcatgtacggttgcagatataaacgaagcatagcttatgtatgaggtgtaacaaaattggaaacaatagccatgcaaggtgaagaatgtcaccaactcagaaacccttcttcattgacgtgtccctcactcactctcctctcttcactataaatcgccactcttcgtgttctccacttcaccaactccttcaaacttattaacactttccttagttcaatatggggaagcccttcttcactctctctctttcttccctttgcttgctactcttgtcgagtgcatgctttgctattacctccagcaaagtgccaactcaacaacctcaacgcgttggaacccgaccaccgcgttgagtccgaaggtggtcttattgaaacatggaactctcaacaccctgagctgcaatgcgccggtgtcactgtttccaaacgcaccctcaaccgcaacggcctccacttgccatcttactcaccttatccccaaatgatcattgtcgttcaaggtgcgtaatattagtaagaagtatttatcagcttaacgtgataacaataatagtaatatgaaatatttattaaatttttataattaatctctgctagaaaatttgattaatcattttagtagaatttgtttttctcaactaggtttttaaaacacca

SEQ ID NO: 5428 - DNA, 658 bp, Artificial
  Mutations within GlyA3B4 introduced by GmGlyA3B4_T03TALE nuclease
gttcatgtacggttgcagatataaacgaagcatagcttatgtatgaggtgtaacaaaattggaaacaatagccatgcaaggtgaagaatgtcaccaactcagaaacccttcttcattgacgtgtccctcactcactctcctctcttcactataaatcgccactcttcgtgttctccacttcaccaactccttcaaacttattaacactttccttagttcaatatggggaagcccttcttcactctctctctttcttccctttgcttgctactcttgtcgagtgcatgctttgctattacctccagcaatgccaactcaacaacctcaacgcgttggaacacgaccaccgcgttgagtccgaaggtggtcttattgaaacatggaactctcaacaccctgagctgcaatgcgccggtgtcactgtttccaaacgcaccctcaaccgcaacggcctccacttgccatcttactcaccttatccccaaatgatcattgtcgttcaaggtgcgtaatattagtaagaagtatttatcagcttaacgtgataacaatatagtaatatgaaatatttattaaatttttataattaatctctgctagaaaatttgattaatcattttagtagaatttgtttttctcaactaggttttaaaacacc

SEQ ID NO: 5429 - DNA, 646 bp, Artificial
  Mutations within GlyA3B4 introduced by GmGlyA3B4_T03TALE nuclease
  misc_feature (20): n is a or c or t or g
gttcatgtacggttgcaganataaacgaagcatagcttatgtatgaggtgtaacaaaattggaaacaatagccatgcaaggtgaagaatgtcaccaactcagaaacccttcttcattgacgtgtccctcactcactctcctctcttcactataaatcgccactcttcgtgttctccacttcaccaactccttcaaacttattaacactttccttagttcaatatggggaagcccttcttcactctctctctttcttccctttgcttgctactcttgtcgagtgcatgctttgctattacctccagcaagttagtgccaactcaacaacctcaacgcgttggaacccgaccaccgcgttgagtccgaaggtggtcttattgaaacatggaactctcaacaccctgagctgcaatgcgccggtgtcactgtttccaaacgcaccctcaaccgcaacggcctccacttgccatcttactcaccttatccccaaatgatcattgtcgttcaaggtgcgtaatattagtaagaagtatttatcagcttaacgtgataacaataatagtaatatgaaatatttattaaatttttataattaatctctgctagaaaatttgattaatcattttagtagaatttgttttctcaa

SEQ ID NO: 5430 - DNA, 665 bp, Artificial
  Mutations within GlyA3B4 introduced by GmGlyA3B4_T03TALE nuclease
gttcatgtacggttgcagatataaacgaagcatagcttatgtatgaggtgtaacaaaattggaaacaatagccatgcaaggtgaagaatgtcaccaactcagaaacccttcttcattgacgtgtccctcactcactctcctctcttcactataaatcgccactcttcgtgttctccacttcaccaactccttcaaacttattaacactttccttagttcaatatggggaagcccttcttcactctctctctttcttccctttgcttgctactcttgtcgagtgcatgctttgctattacctccagcaaagagtgccaactcaacaacctcaacgcgttggaacccgaccaccgcgttgagtccgaaggtggtcttattgaaacatggaactctcaacaccctgagctgcaatgcgccggtgtcactgtttccaaacgcaccctcaaccgcaacggcctccacttgccaatcttactcaccttatccccaaatgatcattgtcgttcaaggtgcgtaatattagtaagaagtatttatcagcttaacgtgataacaatatagtaatatgaaatatttattaaatttttataattaatctctgctagaaaatttgattaatcattttagtagaatttgtttttctcaactaggtttttaaaacacca

SEQ ID NO: 5431 - DNA, 640 bp, Artificial
  Mutations within GlyA3B4 introduced by GmGlyA3B4_T03TALE nuclease
gttcatgtacggttgcagatataaacgaagcatagcttatgtatgaggtgtaacaaaattggaaacaatagccatgcaaggtgaagaatgtcaccaactcagaaacccttcttcattgacgtgtccctcactcactctcctctcttcactataaatcgccactcttcgtgttctccacttcaccaactccttcaaacttattaacactttccttagttcaatatggggaagcccttcttcactctctctctttcttccctttgcttgctactcttgtcgagtgcatgctttgctattacctccaacaacctcaacgcgttggaacccgaccaccgcgttgagtccgaaggtggtcttattgaaacatggaactctcaacaccctgagctgcaatgcgccggtgtcactgtttccaaacgcaccctcaaccgcaacggcctccacttgccatcttactcaccttatccccaaatgatcattgtcgttcaaggtgcgtaatattagtaagaagtatttatcagcttaacgtgataacaataatagtaatatgaaatatttattaaattttttataattaatctctgctagaaaatttgattaatcatttttagtagaatttgttttttctcaactaggtttt

SEQ ID NO: 5432 - DNA, 663 bp, Artificial; identical to SEQ ID NO: 5285
  Mutations within GlyA3B4 introduced by GmGlyA3B4_T03TALE nuclease

SEQ ID NO: 5433 - DNA, 528 bp, Artificial
  Mutations within GlyA3B4 introduced by GmGlyA3B4_T03TALE nuclease
gttcatgtacggttgcagatataaacgaagcatagcttatgtatgaggtgtaacaaaattggaaacaatagccatgcaaggtgaagaatgtcaccaactcagaaacccttcttcattgacgtgtccctcactcactctcctctcttcactataaatcgccactcttcgtgttctccacttcaccaactccttcaaacttattaacactttccttagttcaatatggggaagcccttcttcactctctctctttcttccctttgcttgctactcttgtcgagtgcatgctttgctattacctccagcaagttcaacaccctgagctgcaatgcgccggtgtcactgtttccaaacgcaccctcaaccgcaacggcctccacttgccatcttactcaccttatccccaaatgatcattgtcgttcaaggtgcgtaatattagtaagaagtatttatcagcttaacgtgataacaataatagtaatatgaaatatttattaaattttttataattaatctctgctagaaaa

SEQ ID NO: 5434 - DNA, 660 bp, Artificial
  Mutations within GlyA3B4 introduced by GmGlyA3B4_T03TALE nuclease
gttcatgtacggttgcagatataaacgaagcatagcttatgtatgaggtgtaacaaaattggaaacaatagccatgcaaggtgaagaatgtcaccaactcagaaacccttcttcattgacgtgtccctcactcactctcctctcttcactataaatcgccactcttcgtgttctccacttcaccaactccttcaaacttattaacactttccttagttcaatatggggaagcccttcttcactctctctctttcttccctttgcttgctactcttgtcgagtgcatgctttgctattacctccagcaagtgccaactcaacaacctcaacgcgttggaacccgaccaccgcgttgagtccgaaggtggtcttattgaaacatggaactctcaacaccctgagctgcaatgcgccggtgtcactgtttccaaacgcaccctcaaccgcaacggcctccacttgccatcttactcaccttatccccaaatgatcattgtcgttcaaggtgcgtaatattagtaagaagtatttatcagcttaacgtgataacaataatagtaatatgaaatatttattaaatttttataatttaatctctgctagaaaatttgattaatcattttagtagaatttgttttctcaactaggttttaaacaaca

SEQ ID NO: 5435 - DNA, 662 bp, Artificial
  Mutations within GlyA3B4 introduced by GmGlyA3B4_T03TALE nuclease
gttcatgtacggttgcagatataaacgaagcatagcttatgtatgaggtgtaacaaaattggaaacaatagccatgcaaggtgaagaatgtcaccaactcagaaacccttcttcattgacgtgtccctcactcactctcctctcttcactataaatcgccactcttcgtgttctccacttcaccaactccttcaaacttattaacactttccttagttcaatatggggaagcccttcttcactctctctctttcatccctttgcttgctactcttgtcgagtgcatgctttgctattacctccagcaagtgccaactcaacaacctcaacgcgttggaacccgaccaccgcgttgagtccgaaggtggtcttattgaaacatggaactctcaacaccctgagctgcaatgcgccggtgtcactgtttccaaacgcaccctcaaccgcaacggcctccacttgccatcttactcaccttatccccaaatgatcattgtcgttcaaggtgcgtaatattagtaagaagtatttatcagcttaacgtgataacaataatagtaatatgaaatatttattaaatttttataattaatctctgctagaaaatttgattaatcattttagtagaatttgtttttctcaactaggtttttaaaacacca

SEQ ID NO: 5436 - DNA, 631 bp, Artificial
  Mutations within GlyA3B4 introduced by GmGlyA3B4_T03TALE nuclease
gttcatgtacggttgcagatataaacgaagcatagcttatgtatgaggtgtaacaaaattggaaacaatagccatgcaaggtgaagaatgtcaccaactcagaaacccttcttcattgacgtgtccctcactcactctcctctcttcactataaatcgccactcttcgtgttctccacttcaccaactccttcaaacttattaacactttccttagttcaatatggggaagcccttcttcactctctctctttcttccctttgcttgctactcttgtcgagtgccaactcaacaacctcaacgcgttggaacccgaccaccgcgttgagtccgaaggtggtcttattgaaacatggaactctcaacaccctgagctgcaatgcgccggtgtcactgtttccaaacgcaccctcaaccgcaacggcctccacttgccatcttactcaccttatccccaaatgatcattgtcgttcaaggtgcgtaatattagtaagaagtatttatcagcttaacgtgataacaataatagtaatatgaaatatttattaatttttataattaatctctgctagaaaatttgattaatcatttttagtagaaatttgtttttctcaactaggtttttaaaca

SEQ ID NO: 5437 - DNA, 660 bp, Artificial
  Mutations within GlyA3B4 introduced by GmGlyA3B4_T03TALE nuclease
gttcatgtacggttgcagatataaacgaagcatagcttatgtatgaggtgtaacaaaattggaaacaatagccatgcaaggtgaagaatgtcaccaactcagaaacccttcttcattgacgtgtcccctcactcactctcctctcttcactataaatcgccactcttcgtgttctccacttcaccaactccttcaaacttattaacactttccttagttcaatatggggaagcccttcttcactctctctctttcttccctttgcttgctactcttgtcgagtgcatgctttcttcccttcttccaactcaacaacctcaacgcgttggaacccgaccaccgcgttgagtccgaaggtggtcttattgaaacatggaactctcaacaccctgagctgcaatgcgccggtgtcactgtttccaaacgcaccctcaaccgcaacggcctccacttgccatcttactcaccttatcccccaaatgatcattgtcgttcaaggtgcgtaaatattagtaagaagtatttatcagcttaacgtgataacaataatagtaatatgaaatatttattaaattttttataattaatctctgctagaaaatttgattaatcatttttagtagaatttgttttttctcaactaggttttaaaacaccaca

SEQ ID NO: 5438 - DNA, 644 bp, Artificial
  Mutations within GlyA3B4 introduced by GmGlyA3B4_T03TALE nuclease
gttcatgtacggttgcagatataaacgaagcatagcttatgtatgaggtgtaacaaaattggaaacaatagccatgcaaggtgaagaatgtcaccaactcagaaacccttcttcattgacgtgtccctcactcactctcctctcttcactataaatcgccactcttcgtgttctccacttcaccaactccttcaaacttattaacactttccttagttcaatatggggaagcccttcttcactctctctctttcttccctttgcttgctactcttgtcgagtgcatgctttgctattacctccagcaagttagtgccaactcaacaacctcaacgcgttggaacccgaccaccgcgttgagtccgaaggtggtcttattgaaacatggaactctcaacaccctgagctgcaatgcgccggtgtcactgtttccaaacgcaccctcaaccgcaacggcctccacttgccatcttactcaccttatccccaaatgatcattgtcgttcaaggtgcgtaatattagtaagaagtatttatcagcttaacgtgatacaatatagtaatatgaaatatttattaaatttttataattaatctctgctagaaaatttgattaatcattttagtagaatttgttttctcaa

SEQ ID NO: 5439 - DNA, 572 bp, Artificial
  Mutations within GlyA3B4 introduced by GmGlyA3B4_T03TALE nuclease
gttcatgtacggttgcagatataaacgaagcatagcttatgtatgaggtgtaacaaaattggaaacaatagccatgcaaggtgaagaatgtcaccaactcagaaacccttcttcattgacgtgtccctcactcactctcctctcttcactataaatcgccactcttcgtgttctccacttcaccaactccttcaaacttattaacactttccttagttcaatatggggaagcccttcttcactctctctctttcttccctttgcttgctactcttgtcgagtgcatgctttgctattacctccagcgcgttgagtccgaaggtggtcttattgaaacatggaactctcaacaccctgagctgcaatgcgccggtgtcactgtttccaaacgcaccctcaaccgcaacggcctccacttgccatcttactcaccttatccccaaatgatcattgtcgttcaaggtgcgtcaatattagtaagaagtatttatcagcttaacgtgatacaataatagtaatatgaatatttattaatttttataattaatctctgctagaaatttgattaatca

SEQ ID NO: 5440 - DNA, 624 bp, Artificial
  Mutations within GlyA3B4 introduced by GmGlyA3B4_T03TALE nuclease
gttcatgtacggttgcagatataaacgaagcatagcttatgtatgaggtgtaacaaaattggaaacaatagccatgcaaggtgaagaatgtcaccaactcagaaacccttcttcattgacgtgtccctcactcactctcctctcttcactataaatcgccactcttcgtgttctccacttcaccaactccttcaaacttattaacactttccttagttcaatatggggaagcccttcttcactctctctctttcttccctttgcttgctactcttgtcgagtgcatgctttgctattacctccagcaagttcgtgccaactcaacaacctcaacgcgttggaacccgaccaccgcgttgagtccgaaggtggtcttattgaaacatggaactctcaacaccctgagctgcaatgcgccggtgtcactgtttccaaacgcaccctcaaccgcaacggcctccacttgccatcttactcaccttatccccaaatgatcattgtcgttcaaggtgcgtaatattagtaagaagtatttatcagcttaacgtgataacaataatagtaatatgaaatatttattaaatttttataatttaatctctgctagaaaatttgattaatcaa

SEQ ID NO: 5441 - DNA, 662 bp, Artificial
  Mutations within GlyA3B4 introduced by GmGlyA3B4_T03TALE nuclease
gttcatgtacggttgcagatataaacgaagcatagcttatgtatgaggtgtaacaaaattggaaacaatagccatgcaaggtgaagaatgtcaccaactcagaaacccttcttcattgacgtgtccctcactcactctcctctcttcactataaatcgccactcttcgtgttctccacttcaccaactccttcaaacttattaacactttccttagttcaatatggggaagcccttcttcactctctctctttcttccctttgcttgctactcttgtcgagtgcatgctttgctattacctccagcaaagtgccaactcaacaacctcaacgcgttggaacccgaccaccgcgttgagtccgaaggtggtcttattgaaacatggaactctcaacaccctgagctgcaatgcgccggtgtcactgtttccaaacgcaccctcaaccgcaacggcctccacttgccatcttactcaccttatccccaaatgatcattgtcgttcaaggtgcgtaatattagtaagaagtatttatcagcttaacgtgataacaataatagtaatatgaaatatttattaaatttttataattaatctctgctagaaaatttgattaatcattttagtagaatttgttttctcaactaggtttttaaaacacca

SEQ ID NO: 5442 - DNA, 660 bp, Artificial; identical to SEQ ID NO: 4874
  Mutations within GlyA3B4 introduced by GmGlyA3B4_T03TALE nuclease

SEQ ID NO: 5443 - DNA, 645 bp, Artificial; identical to SEQ ID NO: 4887
  Mutations within GlyA3B4 introduced by GmGlyA3B4_T03TALE nuclease

SEQ ID NO: 5444 - DNA, 540 bp, Artificial
  Mutations within GlyA3B4 introduced by GmGlyA3B4_T03TALE nuclease
gttcatgtacggttgcagatataaacgaagcatagcttatgtatgaggtgtaacaaaattggaaacaatagccatgcaaggtgaagaatgtcaccaactcagaaacccttcttcattgacgtgtccctcactcactctcctctcttcactataaatcgccactcttcgtgttctccacttcaccaactccttcaaacttattaacactttccttagttcaatatggggaagcccttcttcactctctctctttcttccctttgcttgctactcttgagtccgaaggtggtcttattgaaacatggaactctcaacaccctgagctgcaatgcgccggtgtcactgtttccaaacgcaccctcaaccgcaacggcctccagcttgccatcttactcaccttatccccaaatgatcattgtcgttcaaggtgcgtaatattagtaagaagtatttatcagcttaacgtgataacaataatagtaatatgaaatatttattaaattttttatattaatctctgctagaaaatttgattaatca

SEQ ID NO: 5445 - DNA, 665 bp, Artificial
  Mutations within GlyA3B4 introduced by GmGlyA3B4_T03TALE nuclease
gttcatgtacggttgcagatataaacgaagcatagcttatgtatgaggtgtaacaaaattggaaacaatagccatgcaaggtgaagaatgtcaccaactcagaaacccttcttcattgacgtgtccctcactcactctcctctcttcactataaatcgccactcttcgtgttctccacttcaccaactccttcaaacttattaacactttccttagttcaatatggggaagcccttcttcactctctctctttcttccctttgcttgctactcttgtcgagtgcatgctttgctattacctccagcaagttcgtgccaactcaacaacctcaacgcgttggaacccgaccaccgcgttgagtccgaaggtggtcttattgaaacatggaactctcaacaccctgagctgcaatgcgccggtgtcactgtttccaaacgcaccctcaaccgcaacggcctccacttgccatcttactcaccttatccccaaatgatcattgtcgttcaaggtgcgtaatattagtaagaagtatttatcagcttaacgtgataacaataatagtaatatgaaatatttattaaatttttataattaatctctgctagaaaatttgattaatcattttagtagaatttgttttctcaactaggtttttaaaacacca

SEQ ID NO: 5446 - DNA, 667 bp, Artificial
  Mutations within GlyA3B4 introduced by GmGlyA3B4_T03TALE nuclease
  misc_feature (532): n is a or c or t or g
gttcatgtacggttgcagatataaacgaagcatagcttatgtatgaggtgtaacaaaattggaaacaatagccatgcaaggtgaagaatgtcaccaactcagaaacccttcttcattgacgtgtccctcactcactctcctctcttcactataaatcgccactcttcgtgttctccacttcaccaactccttcaaacttattaacactttccttagttcaatatggggaagcccttcttcactctctctctttcttccctttgcttgctactcttgtcgagtgcatgctttgctattacctccagcaagtcgagtgccaactcaacaacctcaacgcgttggaacccgaccaccgcgttgagtccgaaggtggtcttattgaaacatggaactctcaacaccctgagctgcaatgcgccggtgtcactgtttccaaacgcaccctcaaccgcaacggcctccacttgccatcttactcaccttatcccccaaatgatcattgtcgttcaaggtgcgtaatattagtaagagnatttatcagcttaacgtgatacaatatagtaatatgaaatatttattaaatttttataattaatctctgctagaaaatttgattaatcattttagtagaatttgtttttctcaactaggtttttaaaacaccaca

SEQ ID NO: 5447 - DNA, 536 bp, Artificial
  Mutations within GlyA3B4 introduced by GmGlyA3B4_T03TALE nuclease
gttcatgtacggttgcagatataaacgaagcatagcttatgtatgaggtgtaacaaaattggaaacaatagccatgcaaggtgaagaatgtcaccaactcagaaacccttcttcattgacgtgtccctcactcactctcctctcttcactataaatcgccactcttcgtgttctccacttcaccaactccttcaaacttattaacactttccttagttcaatatggggaagcccttcttcactctctctctttcttccctttgcttgctctcaacaccctgagctgcaatgcgccggtgtcactgtttccaaacgcaccctcaaccgcaacggcctccacttgccatcttactcaccttatccccaaatgatcattgtcgttcaaggtgcgtaatattagtaagaagtatttatcagcttaacgtgataacaataatagtaatatgaaatatttattaaattttttataattaatctctgctagaaaatttgattaatcatttttagtagaatttgtttttctcaactaggttttt

SEQ ID NO: 5448 - DNA, 639 bp, Artificial
  Mutations within GlyA3B4 introduced by GmGlyA3B4_T03TALE nuclease
gttcatgtacggttgcagatataaacgaagcatagcttatgtatgaggtgtaacaaaattggaaacaatagccatgcaaggtgaagaatgtcaccaactcagaaacccttcttcattgacgtgtccctcactcactctcctctcttcactataaatcgccactcttcgtgttctccacttcaccaactccttcaaacttattaacactttccttagttcaatatggggaagcccttcttcactctctctctttcttccctttgcttgctactcttgtcgagtgcatgctttgctattacctccagcaacaacctcaacgcgttggaacccgaccaccgcgttgagtccgaaggtggtcttattgaaacatggaactctcaacaccctgagctgcaatgcgccggtgtcactgtttccaaacgcaccctcaaccgcaacggcctccacttgccatcttactcaccttatccccaaatgatcattgtcgttcaaggtgcgtaaatattagtaagaagtatttatcagcttaacgtgataacaataatagtaatatgaaatatttattaaatttttataattaatctctgctagaaaatttgattaatcatttttagtagaatttgttttttctcaactagg

SEQ ID NO: 5449 - DNA, 461 bp, Artificial; identical to SEQ ID NO: 4808
  Mutations within GlyA3B4 introduced by GmGlyA3B4_T03TALE nuclease

SEQ ID NO: 5450 - DNA, 659 bp, Artificial; identical to SEQ ID NO: 4859
  Mutations within GlyA3B4 introduced by GmGlyA3B4_T03TALE nuclease

SEQ ID NO: 5451 - DNA, 619 bp, Artificial
  Mutations within GlyA3B4 introduced by GmGlyA3B4_T03TALE nuclease
gttcatgtacggttgcagatataaacgaagcatagcttatgtatgaggtgtaacaaaattggaaacaatagccatgcaaggtgaagaatgtcaccaactcagaaacccttcttcattgacgtgtccctcactcactctcctctcttcactataaatcgccactcttcgtgttctccacttcaccaactccttcaaacttattaacactttccttagttcaatatggggaagcccttcttcactctctctctttcttccctttgcttgctactcttgtcgagtgcatgcttttgctattacctccagcaagtgccaactcaacaacctcaacgcgttggaacccgaccaccgcgttgagtccgaaggtggtcttattgaaacatggaactctcaacaccctgagctgcaatgcgccggtgtcactgtttccaaacgcaccctcaaccgcaacggcctccacttgccatcttactcaccttatccccaaatgatcattgtcgttcaaggtgcgtaatattagtaagaagtatttatcagcttaacgtgataacaataatagtaatatgaaatatttattaaatttttataattaatctctgctagaaaatttgattaatca

SEQ ID NO: 5452 - DNA, 629 bp, Artificial
  Mutations within GlyA3B4 introduced by GmGlyA3B4_T03TALE nuclease
gttcatgtacggttgcagatataaacgaagcatagcttatgtatgaggtgtaacaaaattggaaacaatagccatgcaaggtgaagaatgtcaccaactcagaaacccttcttcattgacgtgtccctcactcactctcctctcttcactataaatcgccactcttcgtgttctccacttcaccaactccttcaaacttattaacactttccttagttcaatatggggaagcccttcttcactctctctctttcttccctttgcttgctactcttgtcgagtgcatgctttgctatcaccaactcaacaacctcaacgcgttggaacccgaccaccgcgttgagtccgaaggtggtcttattgaaacatggaactctcaacaccctgagctgcaatgcgccggtgtcactgtttccaaacgcaccctcaaccgcaacggcctccacttgccatcttactcaccttatccccaaatgatcattgtcgttcaaggtgcgtaatattagtaagaagtatttatcagcttaacgtgataacaataatagtaatatgaaatattattaaatttttaattaattaattctctgctagaaaatttgattaatcatttttagtagaatttgtttttt

SEQ ID NO: 5453 - DNA, 643 bp, Artificial
  Mutations within GlyA3B4 introduced by GmGlyA3B4_T03TALE nuclease
gttcatgtacggttgcagatataaacgaagcatagcttatgtatgaggtgtaacaaaattggaaacaatagccatgcaaggtgaagaatgtcaccaactcagaaacccttcttcattgacgtgtccctcactcactctcctctcttcactataaatcgccactcttcgtgttctccacttcaccaactccttcaaacttattaacactttccttagttcaatatggggaagcccttcttcactctctctctttcttccctttgcttgctactcttgtcgagtgcatgctttgctattacctccagcaagtgccaactcaacaacctcaacgcgttggaacccgaccaccgcgttgagtccgaaggtggtcttattgaaacatggaactctcaacaccctgagctgcaatgcgccggtgtcactgtttccaaacgcaccctcaaccgcaacggcctccacttgccatcttactcaccttatccccaaatgatcattgtcgttcaaggtgcgtaatattagtaagaagtatttatcagcttaacgtgataacaataatagtaatatgaaatatttattaaatttttataattaatctctgctagaaaatttgattaatcattttagtagaatttgtttttctcaa

SEQ ID NO: 5454 - DNA, 601 bp, Artificial
  Mutations within GlyA3B4 introduced by GmGlyA3B4_T03TALE nuclease
gttcatgtacggttgcagatataaacgaagcatagcttatgtatgaggtgtaacaaaattggaaacaatagccatgcaaggtgaagaatgtcaccaactcagaaacccttcttcattgacgtgtccctcactcactctcctctcttcactataaatcgccactcttcgtgttctccacttcaccaactccttcaaacttattaacactttccttagttcaatatggggaagcccttcttcactctctctctttcttccctttgcttgctactcttgtcgagtgcatgcatggggaacccgaccaccgcgttgagtccgaaggtggtcttattgaaacatggaactctcaacaccctgagctgcaatgcgccggtgtcactgtttccaaacgcaccctcaaccgcaacggcctccacttgccatcttactcaccttatccccaaatgatcattgtcgttcaaggtgcgtaatattagtaagaagtatttatcagcttaacgtgataacaataatagtaatatgaaatatttattaatttttataattaatctctgctagaaaatttgattaatcatttttagtagaatttgtttttctcaac

SEQ ID NO: 5455 - DNA, 637 bp, Artificial; identical to SEQ ID NO: 5307
  Mutations within GlyA3B4 introduced by GmGlyA3B4_T03TALE nuclease

SEQ ID NO: 5456 - DNA, 647 bp, Artificial
  Mutations within GlyA3B4 introduced by GmGlyA3B4_T03TALE nuclease
gttcatgtacggttgcagatataaacgaagcatagcttatgtatgaggtgtaacaaaattggaaacaatagccatgcaaggtgaagaatgtcaccaactcagaaacccttcttcattgacgtgtccctcactcactctcctctcttcactataaatcgccactcttcgtgttctccacttcaccaactccttcaaacttattaacactttccttagttcaatatggggaagcccttcttcactctctctctttcttccctttgcttgctactcttgtcgagtgcatgcttttgctattacctccagcaaggagtgccaactcaacaacctcaacgcgttggaacccgaccaccgcgttgagtccgaaggtggtcttattgaaacatggaactctcaacaccctgagctgcaatgcgccggtgtcactgtttccaaacgcaccctcaaccgcaacggcctccacttgccatcttactcaccttatccccaaatgatcattgtcgttcaaggtgcgtaatattagtaagaagtatttatcagcttaacgtgataacaataatagtaatatgaaatatttattaaatttttataatttaatctctgctagaaaatttgattaatcattttagtagaatttgttttctcaa

SEQ ID NO: 5457 - DNA, 618 bp, Artificial
  Mutations within GlyA3B4 introduced by GmGlyA3B4_T03TALE nuclease
gttcatgtacggttgcagatataaacgaagcatagcttatgtatgaggtgtaacaaaattggaaacaatagccatgcaaggtgaagaatgtcaccaactcagaaacccttcttcattgacgtgtccctcactcactctcctctcttcactataaatcgccactcttcgtgttctccacttcaccaactccttcaaacttattaacactttccttagttcaatatggggaagcccttcttcactctctctctttcttccctttgcttgctactcttgtcgaagtgccaactcaacaacctcaacgcgttggaacccgaccaccgcgttgagtccgaaggtggtcttattgaaacatggaactctcaacaccctgagctgcaatgcgccggtgtcactgtttccaaacgcaccctcaaccgcaacggcctccacttgccatcttactcaccttatccccaaatgatcattgtcgttcaaggtgcgtaatattagtaagaagtatttatcagcttaacgtgataacaataatagtaatatgaaatatttattaattttttataattaatctctgctagaaaatttgattaatcatttttagtagaatttgtttttctcaac

SEQ ID NO: 5458 - DNA, 562 bp, Artificial
  Mutations within GlyA3B4 introduced by GmGlyA3B4_T03TALE nuclease
gttcatgtacggttgcagatataaacgaagcatagcttatgtatgaggtgtaacaaaattggaaacaatagccatgcaaggtgaagaatgtcaccaactcagaaacccttcttcattgacgtgtccctcactcactctcctctcttcactataaatcgccactcttcgtgttctccacttcaccaactccttcaaacttattaacactttccttagttcaatatggggaagcccttcttcactctctctctttcttccctttgcttgctactcttattgagagagagtccgaaggtggtcttattgaaacatggaactctcaacaccctgagctgcaatgcgccggtgtcactgtttccaaacgcaccctcaaccgcaacggcctccacttgccatcttactcaccttatccccaaatgatcattgtcgttcaaggtgcgtaatattagtaagaagtatttatcagcttaacgtgataacaataatagtaatatgaaatatttattaaattttttataattaatctctgctagaaaattttgattaatcatttttagtagaa

SEQ ID NO: 5459 - DNA, 617 bp, Artificial
  Mutations within GlyA3B4 introduced by GmGlyA3B4_T03TALE nuclease
gttcatgtacggttgcagatataaacgaagcatagcttatgtatgaggtgtaacaaaattggaaacaatagccatgcaaggtgaagaatgtcaccaactcagaaacccttcttcattgacgtgtccctcactcactctcctctcttcactataaatcgccactcttcgtgttctccacttcaccaactccttcaaacttattaacactttccttagttcaatatggggaagcccttcttcactctctctctttcttccctttgcttgctactcttgtcgagtgcatgctttgctattacctccagcgagtgccaactcaacaacctcaacgcgttggaacccgaccaccgcgttgagtccgaaggtggtcttattgaacatggaactctcaacaccctgagctgcaatgcgccggtgtcactgtttccaaacgcaccctcaaccgcaacggcctccacttgccatcttactcaccttatccccaaatgatcattgtcgttcaaggtgcgtaatattagtaagaagtatttatcagcttaacgtgataacaataatagtaatatgaaatatttattaaatttttataattaatctctgctagaaaatttgattaatca

SEQ ID NO: 5460 - DNA, 641 bp, Artificial
  Mutations within GlyA3B4 introduced by GmGlyA3B4_T03TALE nuclease
gttcatgtacggttgcagatataaacgaagcatagcttatgtatgaggtgtaacaaaattggaaacaatagccatgcaaggtgaagaatgtcaccaactcagaaacccttcttcattgacgtgtccctcactcactctcctctcttcactataaatcgccactcttcgtgttctccacttcaccaactccttcaaacttattaacactttccttagttcaatatggggaagcccttcttcactctctctctttcttccctttgcttgctactcttgtcgagtgcatgctttgctattacctgccaactcaacaacctcaacgcgttggaacccgaccaccgcgttgagtccgaaggtggtcttattgaaacatggaactctcaacaccctgagctgcaatgcgccggtgtcactgtttccaacgcaccctcaaccgcaacggcctccacttgccatcttactcaccttatcccccaaatgatcattgtcgttcaaggtgcgtaatattagtaagaagtatttatcagcttaacgtgataacaataatagtaatatgaaatatttattaaattttttataattaatctctgctagaaaatttgattaatctttttagtagaatttgttttttctcaactagg

SEQ ID NO: 5461 - DNA, 559 bp, Artificial
  Mutations within GlyA3B4 introduced by GmGlyA3B4_T03TALE nuclease
gttcatgtacggttgcagatataaacgaagcatagcttatgtatgaggtgtaacaaaattggaaacaatagccatgcaaggtgaagaatgtcaccaactcagaaacccttcttcattgacgtgtccctcactcactctcctctcttcactataaatcgccactcttcgtgttctccacttcaccaactccttcaaacttattaacactttccttagttcaatatggggaagcccttcttcactctctctctttcttccctttgcttgctactcttgtcgagtgcatgctttgctattacctccagcaagttcaacgtttgaaggtggtcttattgaaacatggaactctcaacaccctgagctgcaatgcgccggtgtcactgtttccaaacgcaccctcaaccgcaacggcctccacttgccatcttactcaccttatccccaaatgatcattgtcgttcaaggtgcgtaatattagtaagaagtatttatcagcttaacgtgataacaataatagtaatatgaatatttattaatttttataattaatctctgctag

SEQ ID NO: 5462 - DNA, 650 bp, Artificial
  Mutations within GlyA3B4 introduced by GmGlyA3B4_T03TALE nuclease
gttcatgtacggttgcagatataaacgaagcatagcttatgtatgaggtgtaacaaaattggaaacaatagccatgcaaggtgaagaatgtcaccaactcagaaacccttcttcattgacgtgtccctcactcactctcctctcttcactataaatcgccactcttcgtgttctccacttcaccaactccttcaaacttattaacactttccttagttcaatatggggaagcccttcttcactctctctctttcttccctttgcttgctactcttgtcgagtgcatgctttgctattacctccagcaagttagtgccaactcaacaacctcaacgcgttggaacccgaccaccgcgttgagtccgaaggtggtcttattgaaacatggaactctcaacaccctgagctgcaatgcgccggtgtcactgtttccaaacgcaccctcaaccgcaacggcctccacttgccatcttactcaccttatccccaaatgatcattgtcgttcaaggtgcgtaatattagtaagaagtatttatcagcttaacgtgatacaataatagtaatatgaaatatttattaaatttttataattaatctctgctagaaaatttgattaatcattttagtagaatttgttttctcaactagg

SEQ ID NO: 5463 - DNA, 576 bp, Artificial
  Mutations within GlyA3B4 introduced by GmGlyA3B4_T03TALE nuclease
gttcatgtacggttgcagatataaacgaagcatagcttatgtatgaggtgtaacaaaattggaaacaatagccatgcaaggtgaagaatgtcaccaactcagaaacccttcttcattgacgtgtccctcactcactctcctctcttcactataaatcgccactcttcgtgttctccacttcaccaactccttcaaacttattaacactttccttctagttcaatatggggaagcccttcttcactctctctctttcttccctttgcttgctactcttgtcgagtgccaactcaacaacctcaacgcgttggaacccgaccaccgcgttgagtcccgaaggtggtcttattgaaacatggaactctcaacaccctgagctgcaatgcgccggtgtcactgtttccaaacgcaccctcaaccgcaacggcctccacttgccatcttactcaccttatccccaaatgatcattgtcgttcaaggtgcgtaatattagtaagaagtatttatcagcttaacgtgataacaataatagtaatatgaaatatttattaatttttataattaatctctgctag

SEQ ID NO: 5464 - DNA, 661 bp, Artificial
  Mutations within GlyA3B4 introduced by GmGlyA3B4_T03TALE nuclease
gttcatgtacggttgcagatataaacgaagcatagcttatgtatgaggtgtaacaaaattggaaacaatagccatgcaaggtgaagaatgtcaccaactcagaaacccttcttcattgacgtgtccctcactcactctcctctcttcactataaatcgccactcttcgtgttctccacttcaccaactccttcaaacttattaacactttccttagttcaatatggggaagcccttcttcactctctctctttcttccctttgcttgctactcttgtcgagtgcatgctttgctattacctccagcaagagtgccaactcaacaacctcaacgcgttggaacccgaccaccgcgttgagtccgaaggtggtcttattgaacatggaactctcaacaccctgagctgcaatgcgccggtgtcactgtttccaaacgcaccctcaaccgcaacggcctccacttgccatcttactcaccttatccccaaatgatcattgtcgttcaaggtgcgtaatattagtaagaagtatttatcagcttaacgtgataacaataatagtaatatgaaatatttattaaatttttataattaatctctgctagaaaatttgattaatcattttagtagaatttgttttctcaactaggttttaaaacacca

SEQ ID NO: 5465 - DNA, 634 bp, Artificial
  Mutations within GlyA3B4 introduced by GmGlyA3B4_T03TALE nuclease
gttcatgtacggttgcagatataaacgaagcatagcttatgtatgaggtgtaacaaaattggaaacaatagccatgcaaggtgaagaatgtcaccaactcagaaacccttcttcattgacgtgtccctcactcactctcctctcttcactataaatcgccactcttcgtgttctccacttcaccaactccttcaaacttattaacactttccttagttcaatatggggaagcccttcttcactctctctctttcttccctttgcttgctactcttgtcgagtgcatgctttgctattacctccagcaagtgccaactcaacaacctcaacgcgttggaacccgaccaccgcgttgagtccgaaggtggtcttattgaaacatggaactctcaacaccctgagctgcaatgcgccggtgtcactgtttccaaacgcaccctcaaccgcaacggcctccacttgccatcttactcaccttatccccaaatgatcattgtcgttcaaggtgcgtaatattagtaagaagtatttatcagcttaacgtgataacaataatagtaatatgaaatatttattaaatttttataatttaatctctgctagaaaatttgattaatcattttagtagaatttg

SEQ ID NO: 5466 - DNA, 539 bp, Artificial
  Mutations within GlyA3B4 introduced by GmGlyA3B4_T03TALE nuclease
gttcatgtacggttgcagatataaacgaagcatagcttatgtatgaggtgtaacaaaattggaaacaatagccatgcaaggtgaagaatgtcaccaactcagaaacccttcttcattgacgtgtccctcactcactctcctctcttcactataaatcgccactcttcgtgttctccacttcaccaactccttcaaacttattaacactttccttagttcaatatgagtaagttggaacccgaccaccgcgttgagtccgaaggtggtcttattgaaacatggaactctcaacacctgagctgcaatgcgccggtgtcactgtttccaaacgcaccctcaaccgcaacggcctccacttgccatcttactcaccttatccccaaatgatcattgtcgttcaaggtgcgtaatattagtaagaagtatttatcagcttaacgtgataacaataatagtaatatgaaatatttattaaattttttataattaatccttgctagaaaattgattaatcatttttagtagaatttgtttttctc

SEQ ID NO: 5467 - DNA, 654 bp, Artificial
  Mutations within GlyA3B4 introduced by GmGlyA3B4_T03TALE nuclease
gttcatgtacggttgcagatataaacgaagcatagcttatgtatgaggtgtaacaaaattggaaacaatagccatgcaaggtgaagaatgtcaccaactcagaaacccttcttcattgacgtgtccctcactcactctcctctcttcactataaatcgccactcttcgtgttctccacttcaccaactccttcaaacttattaacactttccttagttcaatatggggaagcccttcttcactctctctctttcttccctttgcttgctactcttgtcgagtgcatgctttgctattacctccagccaactcaacaacctcaacgcgttggaacccgaccaccgcgttgagtccgaaggtggtcttattgaaacatggaactctcaacaccctgagctgcaatgcgccggtgtcactgtttccaaacgcaccctcaaccgcaacggcctccacttgccatcttactcaccttatccccaaatgatcattgtcgttcaaggtgcgtaatattagtaagaagtatttatcagcttaacgtgataacaataatagtaatatgaaatatttattaaatttttataattaatctctgctagaaaatttgattaatcattttagtagaatttgttttctcaactaggttttaaaacacca

SEQ ID NO: 5468 - DNA, 644 bp, Artificial
  Mutations within GlyA3B4 introduced by GmGlyA3B4_T03TALE nuclease
gttcatgtacggttgcagatataaacgaagcatagcttatgtatgaggtgtaacaaaattggaaacaatagccatgcaaggtgaagaatgtcaccaactcagaaacccttcttcattgacgtgtccctcactcactctcctctcttcactataaatcgccactcttcgtgttctccacttcaccaactccttcaaacttattaacactttccttagttcaatatggggaagcccttcttcactctctctctttcttccctttgcttgctactcttgtcgagtgcatgctttgctattacctccagcaagttggaacccgaccaccgcgttggaacccgaccaccgcgttgagtccgaaggtggtcttattgaaacatggaactctcaacaccctgagctgcaatgcgccggtgtcactgtttccaaacgcaccctcaaccgcaacggcctccacttgccatcttactcaccttatccccaaatgatcattgtcgttcaaggtgcgtaatattagtaagaagtatttatcagcttaacgtgataacaataatagtaatatgaaatatttattaaattttttataattaatctctgctagaaaatttgattaatctttttagtagaattgttttttctcaactagg

SEQ ID NO: 5469 - DNA, 621 bp, Artificial; identical to SEQ ID NO: 5232
  Mutations within GlyA3B4 introduced by GmGlyA3B4_T03TALE nuclease

SEQ ID NO: 5470 - DNA, 641 bp, Artificial
  Mutations within GlyA3B4 introduced by GmGlyA3B4_T03TALE nuclease
gttcatgtacggttgcagatataaacgaagcatagcttatgtatgaggtgtaacaaaattggaaacaatagccatgcaaggtgaagaatgtcaccaactcagaaacccttcttcattgacgtgtccctcactcactctcctctcttcactataaatcgccactcttcgtgttctccacttcaccaactccttcaaacttattaacactttccttagttcaatatggggaagcccttcttcactctctctctttcttccctttgcttgctactcttgtcgagtgcatgctttgctattacctcaacgcgttggaacccgaccaccgcgttgagtccgaaggtggtcttattgaaacatggaactctcaacaccctgagctgcaatgcgccggtgtcactgtttccaaacgcaccctcaaccgcaacggcctccacttgccatcttactcaccttatccccaaatgatcattgtcgttcaaggtgcgtaatattagtaagaagtatttatcagcttaacgtgataacaataatagtaatatgaaatatttattaaattttttataattaattctctgctagaaaatttgattaatcatttttagtagaatttgttttttctcaactaggttttaaacaccaca

SEQ ID NO: 5471 - DNA, 664 bp, Artificial
  Mutations within GlyA3B4 introduced by GmGlyA3B4_T03TALE nuclease
gttcatgtacggttgcagatataaacgaagcatagcttatgtatgaggtgtaacaaaattggaaacaatagccatgcaaggtgaagaatgtcaccaactcagaaacccttcttcattgacgtgtccctcactcactctcctctcttcactataaatcgccactcttcgtgttctccacttcaccaactccttcaaacttattaacactttccttagttcaatatggggaagcccttcttcactctctctctttcttccctttgcttgctactcttgtcgagtgcatgctttgctattacctccagcaagtgagtgccaactcaacaacctcaacgcgttggaacccgaccaccgcgttgagtccgaaggtggtcttattgaaacatggaactctcaacaccctgagctgcaatgcgccggtgtcactgtttccaaacgcaccctcaaccgcaacggcctccacttgccatcttactcaccttatccccaaatgatcattgtcgttcaaggtgcgtaatattagtaagaagtatttatcagcttaacgtgataacaataatagtaatatgaaatatttattaaatttttataattaatctctgctagaaaatttgattaatcattttagtagaatttgtttttctcaactaggtttaaaacacca

SEQ ID NO: 5472 - DNA, 611 bp, Artificial
  Mutations within GlyA3B4 introduced by GmGlyA3B4_T03TALE nuclease
gttcatgtacggttgcagatataaacgaagcatagcttatgtatgaggtgtaacaaaattggaaacaatagccatgcaaggtgaagaatgtcaccaactcagaaacccttcttcattgacgtgtccctcactcactctcctctcttcactataaatcgccactcttcgtgttctccacttcaccaactccttcaaacttattaacactttccttagttcaatatggggaagcccttcttcactctctctctttcttccctttgcttgctactcttgtcgagtgcatgctttgctattacctccagcaagttcaacaacctcaacgcgttggaacccgaccaccgcgttgagtccgaaggtggtcttattgaaacatggaactctcaacaccctgagctgcaatgcgccggtgtcactgtttccaacgcaccctcaaccgcaacggcctccacttgccatcttactcaccttatccccaaatgatcattgtcgttcaaggtgcgtaatattagtaagaagtatttatcagcttaacgtgataacaataatagtaatatgaaatatttattaaattttttataattaatctctgctagaaaatttgattaatc

SEQ ID NO: 5473 - DNA, 632 bp, Artificial; identical to SEQ ID NO: 5150
  Mutations within GlyA3B4 introduced by GmGlyA3B4_T03TALE nuclease

SEQ ID NO: 5474 - DNA, 582 bp, Artificial
  Mutations within GlyA3B4 introduced by GmGlyA3B4_T03TALE nuclease
gttcatgtacggttgcagatataaacgaagcatagcttatgtatgaggtgtaacaaaattggaaacaatagccatgcaaggtgaagaatgtcaccaactcagaaacccttcttcattgacgtgtccctcactcactctcctctcttcactataaatcgccactcttcgtgttctccacttcaccaactccttcaaacttattaacactttccttagttcaatatggggaagcccttcttcactctctctctttcttccctttgcttgctactcttgttggaacccgaccaccgcgttgagtccgaaggtggtcttattgaaacatggaactctcaacaccctgagctgcaatgcgccggtgtcactgtttccaaacgcaccctcaaccgcaacggcctccacttgccatcttactcaccttatccccaaatgatcattgtcgttcaaggtgcgtaatattagtaagaagtatttatcagcttaacgtgataacaataatagtaatatgaaatatttattaaatttttataattaatctctgctagaaaatttgattaatcatttttagtagaatttgttttt

SEQ ID NO: 5475 - DNA, 656 bp, Artificial
  Mutations within GlyA3B4 introduced by GmGlyA3B4_T03TALE nuclease
gttcatgtacggttgcagatataaacgaagcatagcttatgtatgaggtgtaacaaaattggaaacaatagccatgcaaggtgaagaatgtcaccaactcagaaacccttcttcattgacgtgtccctcactcactctcctctcttcactataaatcgccactcttcgtgttctccacttcaccaactccttcaaacttattaacactttccttagttcaatatggggaagcccttcttcactctctctctttcttccctttgcttgctactcttgtcgagtgcatgctttgctattacctccagcaagttcgagtgccaactcaacaacctcaacgcgttggaacccgaccaccgcgttgagtccgaaggtggtcttattgaaacatggaactctcaacaccctgagctgcaatgcgccggtgtcactgtttccaaacgcaccctcaaccgcaacggcctccacttgccatcttactcaccttatccccaaatgatcattgtcgttcaaggtgcgtaatattagtaagagtatttatcagcttaacgtgataacaatatagtaatatgaaatatttattaaatttttataattaatctctgctagaaaatttgattaatcattttagtagaatttgttttctcaactaggttttt

SEQ ID NO: 5476 - DNA, 632 bp, Artificial; identical to SEQ ID NO: 2295
  Mutations within GlyA3B4 introduced by GmGlyA3B4_T03TALE nuclease

SEQ ID NO: 5477 - DNA, 652 bp, Artificial
  Mutations within GlyA3B4 introduced by GmGlyA3B4_T03TALE nuclease
gttcatgtacggttgcagatataaacgaagcatagcttatgtatgaggtgtaacaaaattggaaacaatagccatgcaaggtgaagaatgtcaccaactcagaaacccttcttcattgacgtgtccctcactcactctcctctcttcactataaatcgccactcttcgtgttctccacttcaccaactccttcaaacttattaacactttccttagttcaatatggggaagcccttcttcactctctctctttcttccctttgcttgctactcttgtcgagtgcatgctttgctattacctccagcaagttcaacgcgttggaacccgaccaccgcgttgagtccgaaggtggtcttattgaaacatggaactctcaacaccctgagctgcaatgcgccggtgtcactgtttccaaacgcaccctcaaccgcaacggcctccacttgccatcttactcaccttatccccaaatgatcattgtcgttcaaggtgcgtaaatattagtaagaagtatttatcagcttaacgtgataacaataatagtaatatgaaatatttattaaattttttataattaatctctgctagaaaatttgattaatcatttttagtagaatttgttttttctcaactaggttttaaaacaccaca

SEQ ID NO: 5478 - DNA, 602 bp, Artificial
  Mutations within GlyA3B4 introduced by GmGlyA3B4_T03TALE nuclease
gttcatgtacggttgcagatataaacgaagcatagcttatgtatgaggtgtaacaaaattggaaacaatagccatgcaaggtgaagaatgtcaccaactcagaaacccttcttcattgacgtgtccctcactcactctcctctcttcactataaatcgccactcttcgtgttctccacttcaccaactccttcaaacttattaacactttccttagttcaatatggggaagcccttcttcactctctctctttcttccctttgcttgctactcttgtcgagtgccaactcaacaacctcaacgcgttggaacccgaccaccgcgttgagtccgaaggtggtcttattgaaacatggaactctcaacaccctgagctgcaatgcgccggtgtcactgtttccaaaacgcaccctcaaccgcaacggcctccacttgccatcttactcaccttatccccaaatgatcattgtcgttcaaggtgcgtaatattagtaagaagtatttatcagcttaacgtgataacaataatagtaatatgaaatatttattaaattttttataattaatctctgctagaaaatttgattaatcatttttagtag

SEQ ID NO: 5479 - DNA, 646 bp, Artificial
  Mutations within GlyA3B4 introduced by GmGlyA3B4_T03TALE nuclease
gttcatgtacggttgcagatataaacgaagcatagcttatgtatgaggtgtaacaaaattggaaacaatagccatgcaaggtgaagaatgtcaccaactcagaaacccttcttcattgacgtgtccctcactcactctcctctcttcactataaatcgccactcttcgtgttctccacttcaccaactccttcaaacttattaacactttccttagttcaatatggggaagcccttcttcactctctctctttcttccctttgcttgctactcttgtcgagtgcatgctttgctattacctccagcaagttcagtgccaactcaacaacctcaacgcgttggaacccgaccaccgcgttgagtccgaaggtggtcttattgaaacatggaactctcaacaccctgagctgcaatgcgccggtgtcactgtttccaaacgcaccctcaaccgcaacggcctccacttgccatcttactcaccttatccccaaatgatcattgtcgttcaaggtgcgtaatattagtaagaagtatttatcagcttaacgtgataacaatatagtaatatgaaatatttattaaatttttataattaatctctgctagaaaatttgattaatcattttagtagaatttgttttctcaa

SEQ ID NO: 5480 - DNA, 613 bp, Artificial
  Mutations within GlyA3B4 introduced by GmGlyA3B4_T03TALE nuclease
gttcatgtacggttgcagatataaacgaagcatagcttatgtatgaggtgtaacaaaattggaaacaatagccatgcaaggtgaagaatgtcaccaactcagaaacccttcttcattgacgtgtccctcactcactctcctctcttcactataaatcgccactcttcgtgttctccacttcaccaactccttcaaacttattaacactttccttagttcaatatggggaagcccttcttcactctctctctttcttccctttgcttgctactcttgtcgagtgcatgctttgctattacctccagcaagtgccaactcaacaacctcaacgcgttggaacccgaccaccgcgttgagtccgaaggtggtcttattgaaacatggaactctcaacaccctgagctgcaatgcgccggtgtcactgtttccaaacgcaccctcaaccgcaacggcctccacttgccatcttactcaccttatccccaaatgatcattgtcgttcaaggtgcgtaatattagtaagaagtatttatcagcttaacgtgataacaataatagtaatatgaaatatttattaaatttttataattaatctctgctagaaaatttgatt

SEQ ID NO: 5481 - DNA, 645 bp, Artificial
  Mutations within GlyA3B4 introduced by GmGlyA3B4_T03TALE nuclease
gttcatgtacggttgcagatataaacgaagcatagcttatgtatgaggtgtaacaaaattggaaacaatagccatgcaaggtgaagaatgtcaccaactcagaaacccttcttcattgacgtgtccctcactcactctcctctcttcactataaatcgccactcttcgtgttctccacttcaccaactccttcaaacttattaacactttccttagttcaatatggggaagcccttcttcactctctctctttcttccctttgcttgctactcttgtcgagtgcatgctttgctattacctccagcaagttcaatcaacgcgttggaacccgaccaccgcgttgagtccgaaggtggtcttattgaaacatggaactctcaacaccctgagctacaatgcgccggtgtcactgtttccaaacgcaccctcaaccgcaacggcctccacttgccatcttactcaccttatccccaaatgatcattgtcgttcaaggtgcgtaatattagtaagaagtatttatcagctttaacgtgataacaataatagtaatatgaaatatttattaaattttttataattaatctctgctagaaaatttgattaatcatttttagtagaatttgttttttctcaactaggtttt

SEQ ID NO: 5482 - DNA, 658 bp, Artificial
  Mutations within GlyA3B4 introduced by GmGlyA3B4_T03TALE nuclease
gttcatgtacggttgcagatataaacgaagcatagcttatgtatgaggtgtaacaaaattggaaacaatagccatgcaaggtgaagaatgtcaccaactcagaaacccttcttcattgacgtgtccctcactcactctcctctcttcactataaatcgccactcttcgtgttctccacttcaccaactccttcaaacttattaacactttccttagttcaatatggggaagcccttcttcactctctctctttcttccctttgcttgctactcttgtcgagtgcatgctttgctattacctccagcaacaactcaacaacctcaacgcgttggaacccgaccaccgcgttgagtccgaaggtggtcttattgaaacatggaactctcaacaccctgagctgcaatgcgccggtgtcactgtttccaaacgcaccctcaaccgcaacggcctccacttgccatcttactcaccttatccccaaatgatcattgtcgttcaaggtgcgtaatattagtaagaagtatttatcagcttaacgtgataacaataatagtaatatgaaatatttattaaatttttataattaatctctgctagaaaatttgattaaatcatttttagtagaatttgtttttctcaactaggttttaaaacacc

SEQ ID NO: 5483 - DNA, 665 bp, Artificial; identical to SEQ ID NO: 4918
  Mutations within GlyA3B4 introduced by GmGlyA3B4_T03TALE nuclease

SEQ ID NO: 5484 - DNA, 621 bp, Artificial; identical to SEQ ID NO: 5232
  Mutations within GlyA3B4 introduced by GmGlyA3B4_T03TALE nuclease

SEQ ID NO: 5485 - DNA, 663 bp, Artificial
  Mutations within GlyA3B4 introduced by GmGlyA3B4_T03TALE nuclease
gttcatgtacggttgcagatataaacgaagcatagcttatgtatgaggtgtaacaaaattggaaacaatagccatgcaaggtgaagaatgtcaccaactcagaaacccttcttcattgacgtgtccctcactcactctcctctcttcactataaatcgccactcttcgtgttctccacttcaccaactccttcaaacttattaacactttccttagttcaatatggggaagcccttcttcactctctctctttcttccctttgcttgctactcttgtcgagtgcatgctttgctattacctccagcaaggagtgccaactcaacaacctcaacgcgttggaacccgaccaccgcgttgagtccgaaggtggtcttattgaaacatggaactctcaacaccctgagctgcaatgcgccggtgtcactgtttccaaacgcaccctcaaccgcaacggcctccacttgccatcttactcaccttatccccaaatgatcattgtcgttcaaggtgcgtaatattagtaagaagtatttatcagcttaacgtgataacaataatagtaatatgaaatatttattaaatttttataattaatctctgctagaaaatttgattaatcattttagtagaatttgttttctcaactaggttttaaaacacca

SEQ ID NO: 5486 - DNA, 777 bp, Artificial
  Mutations within GlyA3B4 introduced by GmGlyA3B4_T03TALE nuclease
gttcatgtacggttgcagatataaacgaagcatagcttatgtatgaggtgtaacaaaattggaaacaatagccatgcaaggtgaagaatgtcaccaactcagaaacccttcttcattgacgtgtccctcactcactctcctctcttcactataaatcgccactcttcgtgttctccacttcaccaactccttcaaacttattaacactttccttagttcaatatggggaagcccttcttcactctctctctttcttccctttgcttgctactcttgtcgagtgcatgctttgctattacctccagcaagttgcacacagcccagcttggagcgaacgacctacaccgaactgagatacctacagcgtgagctatgagaaagcgccacgcttcccgaagggagaaaggcggacaggtatccggtaagcggcagagtgccaactcaacaacctcaacgcgttggaacccgaccaccgcgttgagtccgaaggtggtcttattgaacatggaactctcaacacctgagctgcaatgcgccggtgtcactgtttccaaacgcaccctcaaccgcaacggcctccacttgccatcttactcaccttatccccaaatgatcattgtcgttcaaggtgcgtaatattagtaagaagtatttatcaagcttaacgtgataacaataatagtaatatgaaatatttattaaattttttataattaatctctgctagaaaatttgattaatcattttagtagaatttgtttttctcaactaggtttt

SEQ ID NO: 5487 - DNA, 660 bp, Artificial
  Mutations within GlyA3B4 introduced by GmGlyA3B4_T03TALE nuclease
gttcatgtacggttgcagatataaacgaagcatagcttatgtatgaggtgtaacaaaattggaaacaatagccatgcaaggtgaagaatgtcaccaactcagaaacccttcttcattgacgtgtccctcactcactctcctctcttcactataaatcgccactcttcgtgttctccacttcaccaactccttcaaacttattaacactttccttagttcaatatggggaagcccttcttcactctctctctttcttccctttgcttgctactcttgtcgagtgcatgctttgctattacctccagcaagttcgagtgccaactcaacaacctcaacgcgttggaacccgaccaccgcgttgagtccgaaggtggtcttattgaaacatggaactctcaacaccctgagctgcaatgcgccggtgtcactgtttccaaacgcaccctcaaccgcaacggcctccacttgccatcttactcaccttatccccaaatgatcattgtcgttcaaggtgcgtaatattagtaagagtatttatcagcttaacgtgataacaatatagtaatatgaaatatttattaaatttttataattaatctctgctagaaaatttgattaatcattttagtagaatttgttttctcaactaggtttttaaaa

SEQ ID NO: 5488 - DNA, 645 bp, Artificial; identical to SEQ ID NO: 5301
  Mutations within GlyA3B4 introduced by GmGlyA3B4_T03TALE nuclease

SEQ ID NO: 5489 - DNA, 659 bp, Artificial
  Mutations within GlyA3B4 introduced by GmGlyA3B4_T03TALE nuclease
gttcatgtacggttgcagatataaacgaagcatagcttatgtatgaggtgtaacaaaattggaaacaatagccatgcaaggtgaagaatgtcaccaactcagaaacccttcttcattgacgtgtccctcactcactctcctctcttcactataaatcgccactcttcgtgttctccacttcaccaactccttcaaacttattaacactttccttagttcaatatggggaagcccttcttcactctctctctttcttccctttgcttgctactcttgtcgagtgcatgctttgctattacctccagcagttgcaagcctactaacaacctcaacgcgttggaacccgaccaccgcgttgagtccgaaggtggtcttattgaaacatggaactctcaacaccctgagctgcaatgcgccggtgtcactgtttccaaacgcaccctcaaccgcaacggcctccacttgccatcttactcaccttatccccaaatgatcattgtcgttcaaggtgcgtaatattagtaagaagtatttatcagcttaacgtgataacaataatagtaatatgaaatatttattaaatttttataattaatctctgctagaaaatttgattaatcattttagtagaatttgtttttctcaactaggttttaaaa

SEQ ID NO: 5490 - DNA, 603 bp, Artificial
  Mutations within GlyA3B4 introduced by GmGlyA3B4_T03TALE nuclease
gttcatgtacggttgcagatataaacgaagcatagcttatgtatgaggtgtaacaaaattggaaacaatagccatgcaaggtgaagaatgtcaccaactcagaaacccttcttcattgacgtgtccctcactcactctcctctcttcactataaatcgccactcttcgtgttctccacttcaccaactccttcaaacttattaacactttccttagttcaatatggggaagcccttcttcactctctctctttcttccctttgcttgctactcttgtcgagtgcatgcatggggaacccgaccaccgcgttgagtccgaaggtggtcttattgaaacatggaactctcaacaccctgagctgcaatgcgccggtgtcactgtttccaaacgcaccctcaaccgcaacggcctccacttgccatcttactcaccttatccccaaatgatcattgtcgttcaaggtgcgtaatattagtaagaagtatttatcagcttaacgtgataacaataatagtaatatgaaatatttattaatttttataattaatctctgacttagaaatttgattaatcatttttagtagaatttgtttttctcaact

SEQ ID NO: 5491 - DNA, 635 bp, Artificial; identical to SEQ ID NO: 5064
  Mutations within GlyA3B4 introduced by GmGlyA3B4_T03TALE nuclease

SEQ ID NO: 5492 - DNA, 633 bp, Artificial
  Mutations within GlyA3B4 introduced by GmGlyA3B4_T03TALE nuclease
gttcatgtacggttgcagatataaacgaagcatagcttatgtatgaggtgtaacaaaattggaaacaatagccatgcaaggtgaagaatgtcaccaactcagaaacccttcttcattgacgtgtccctcactcactctcctctcttcactataaatcgccactcttcgtgttctccacttcaccaactccttcaaacttattaacactttccttagttcaatatggggaagcccttcttcactctctctctttcttccctttgcttgctactcttgtcgagtgcatgctttgctattacctccagcgagtgccaactcaacaacctcaacgcgttggaacccgaccaccgcgttgagtccgaaggtggtcttattgaaacatggaactctcaacaccctgagctgcaatgcgccggtgtcactgtttccaaacgcaccctcaaccgcaacggcctccacttgccatcttactcaccttatccccaaatgatcattgtcgttcaaggtgcgtaatattagtaagaagtatttatcagcttaacgtgataacaataatagtaatatgaaatatttattaaatttttataattaatctctgctagaaaatttgattaatcattttagtagaatttg

SEQ ID NO: 5493 - DNA, 645 bp, Artificial; identical to SEQ ID NO: 4887
  Mutations within GlyA3B4 introduced by GmGlyA3B4_T03TALE nuclease

SEQ ID NO: 5494 - DNA, 652 bp, Artificial
  Mutations within GlyA3B4 introduced by GmGlyA3B4_T03TALE nuclease
gttcatgtacggttgcagatataaacgaagcatagcttatgtatgaggtgtaacaaaattggaaacaatagccatgcaaggtgaagaatgtcaccaactcagaaacccttcttcattgacgtgtccctcactcactctcctctcttcactataaatcgccactcttcgtgttctccacttcaccaactccttcaaacttattaacactttccttagttcaatatggggaagcccttcttcactctctctctttcttccctttgcttgctactcttgtcgagtgcatgctttgctattacctccaactcaacaacctcaacgcgttggaacccgaccaccgcgttgagtccgaaggtggtcttattgaaacatggaactctcaacaccctgagctgcaatgcgccggtgtcactgtttccaacgcacctcaaccgcaacggcctccacttgccatcttactcaccttatccccaaatgatcattgtcgttcaaggtgcgtaatattagtaagaagtatttatcagcttaacgtgataacaataatagtaatatgaaatatttattaaatttttataattaatctctgctagaaaatttgattaatcatttttagtagaatttgttttttctcaactaggttttaaacaccaca

SEQ ID NO: 5495 - DNA, 649 bp, Artificial
  Mutations within GlyA3B4 introduced by GmGlyA3B4_T03TALE nuclease
gttcatgtacggttgcagatataaacgaagcatagcttatgtatgaggtgtaacaaaattggaaacaatagccatgcaaggtgaagaatgtcaccaactcagaaacccttcttcattgacgtgtccctcactcactctcctctcttcactataaatcgccactcttcgtgttctccacttcaccaactccttcaaacttattaacactttccttagttcaatatggggaagcccttcttcactctctctctttcttccctttgcttgctactcttgtcgagtgcatgctttgctattacctccagcaagttgtgccaactcaacaacctcaacgcgttggaacccgaccaccgcgttgagtccgaaggtggtcttattgaaacatggaactctcacaccctgagctgcaatgcgccggtgtcactgtttccaaacgcaccctcaaccgcaacggcctccacttgccatcttactcaccttatccccaaatgatcattgtcgttcaaggtgcgtaatattagtaagaagtatttatcagcttaacgtgataacaatatagtaatatgaaatatttattaaatttttataattaatctctgctagaaaatttgattaatcattttagtagaatttgtttttctcaactagg

SEQ ID NO: 5496 - DNA, 664 bp, Artificial
  Mutations within GlyA3B4 introduced by GmGlyA3B4_T03TALE nuclease
gttcatgtacggttgcagatataaacgaagcatagcttatgtatgaggtgtaacaaaattggaaacaatagccatgcaaggtgaagaatgtcaccaactcagaaacccttcttcattgacgtgtccctcactcactctcctctcttcactataaatcgccactcttcgtgttctccacttcaccaactccttcaaacttattaacactttccttagttcaatatggggaagcccttcttcactctctctctttcttccctttgcttgctactcttgtcgagtgcatgctttgctattacctccagcaagtagtgccaactcaacaacctcaacgcgttggaacccgaccaccgcgttgagtccgaaggtggtcttattgaaacatggaactctcaacaccctgagctgcaatgcgccggtgtcactgtttccaaacgcaccctcaaccgcaacggcctccacttgccatcttactcaccttatccccaaatgatcattgtcgttcaaggtgcgtaatattagtaagaagtatttatcagcttaacgtgataacaataatagtaatatgaaatatttattaaatttttataattaatctctgctagaaaatttgattaatcattttagtagaatttgttttctcaactaggtttttaaaacacca

SEQ ID NO: 5497 - DNA, 661 bp, Artificial; identical to SEQ ID NO: 4985
  Mutations within GlyA3B4 introduced by GmGlyA3B4_T03TALE nuclease

SEQ ID NO: 5498 - DNA, 666 bp, Artificial
  Mutations within GlyA3B4 introduced by GmGlyA3B4_T03TALE nuclease
gttcatgtacggttgcagacataaacgaagcatagcttatgtatgaggtgtaacaaaattggaaacaatagccatgcaaggtgaagaatgtcaccaactcagaaacccttcttcattgacgtgtccctcactcactctcctctcttcactataaatcgccactcttcgtgttctccacttcaccaactccttcaaacttattaacactttccttagttcaatatggggaagcccttcttcactctctctctttcttccctttgcttgctactcttgtcgagtgcatgctttgctattacctccagcaagttgagtgccaactcaacaacctcaacgcgttggaacccgaccaccgcgttgagtccgaaggtggtcttattgaaacatggaactctcaacaccctgagctgcaatgcgccggtgtcactgtttccaaacgcaccctcaaccgcaacggcctccacttgccatcttactcaccttatccccaaatgatcattgtcgttcaaggtgcgtaatattagtaagaagtatttatcagcttaacgtgataacaataatagtaatatgaaatatttattaaatttttataattaatctctgctagaaaatttgattaatcattttagtagaatttgtttttctcaactaggttttaaaacacca

SEQ ID NO: 5499 - DNA, 649 bp, Artificial
  Mutations within GlyA3B4 introduced by GmGlyA3B4_T03TALE nuclease
gttcatgtacggttgcagatataaacgaagcatagcttatgtatgaggtgtaacaaaattggaaacaatagccatgcaaggtgaagaatgtcaccaactcagaaacccttcttcattgacgtgtccctcactcactctcctctcttcactataaatcgccactcttcgtgttctccacttcaccaactccttcaaacttattaacactttccttagttcaatatggggaagcccttcttcactctctctctttcttccctttgcttgctactcttgtcgagtgcatgctttgctattacctccagcaagtcaactcaacaacctcaacgcgttggaacccgaccaccgcgttgagtccgaaggtggtcttattgaaacatggaactctcaacaccctgagctgcaatgcgccggtgtcactgtttccaaacgcaccctcaaccgcaacggcctccacttgccatcttactcaccttatccccaaatgatcattgtcgttcaaggtgcgtaatattagtaagaagtatttatcagcttaacgtgataacaataatagtaatatgaaatatttattaaatttttataattaatctctgctagaaaatttgattaatcattttagtagaatttgttttctcaactaggtttt

SEQ ID NO: 5500 - DNA, 631 bp, Artificial
  Mutations within GlyA3B4 introduced by GmGlyA3B4_T03TALE nuclease
gttcatgtacggttgcagatataaacgaagcatagcttatgtatgaggtgtaacaaaattggaaacaatagccatgcaaggtgaagaatgtcaccaactcagaaacccttcttcattgacgtgtccctcactcactctcctctcttcactataaatcgccactcttcgtgttctccacttcaccaactccttcaaacttattaacactttccttagttcaatatggggaagcccttcttcactctctctctttcttccctttgcttgctactcttgtcgagtgcatgctttgctattacctccagcaagttcaactcaacaacctcaacgcgttggaacccgaccaccgcgttgagtccgaaggtggtcttattgaaacatggaactctcaacaccctgagctgcaatgcgccggtgtcactgtttccaaacgcaccctcaaccgcaacggcctccacttgccatcttactcaccttatccccaaatgatcattgtcgttcaaggtgcgtaatattagtaagaagtatttatcagcttaacgtgataacaatatagtaatatgaaatatttattaaatttttataattaatctctgctagaaaatttgattaatcattttagtagaatttg

SEQ ID NO: 5501 - DNA, 650 bp, Artificial
  Mutations within GlyA3B4 introduced by GmGlyA3B4_T03TALE nuclease
gttcatgtacggttgcagatataaacgaagcatagcttatgtatgaggtgtaacaaaattggaaacaatagccatgcaaggtgaagaatgtcaccaactcagaaacccttcttcattgacgtgtccctcactcactctcctctcttcactataaatcgccactcttcgtgttctccacttcaccaactccttcaaacttattaacactttccttagttcaatatggggaagcccttcttcactctctctctttcttccctttgcttgctactcttgtcgagtgcatgctttgctattacctccagcaagttcaacgcgttggaacccgaccaccgcgttgagtccgaaggtggtcttattgaaacatggaactctcaacaccctgagctgcaatgcgccggtgtcactgtttccaaacgcaccctcaaccgcaacggcctccacttgccatcttactcaccttatccccaaatgatcattgtcgttcaaggtgcgtaatattagtaagaagtatttatcagcttaacgtgataacaataatagtaatatgaaatatttattaaattttttataattaatctctgctagaaaatttgattaatcatttttagtagaatttgttttttctcaactaggttttaaacaccaca

SEQ ID NO: 5502 - DNA, 661 bp, Artificial
  Mutations within GlyA3B4 introduced by GmGlyA3B4_T03TALE nuclease
gttcatgtacggttgcagatataaacgaagcatagcttatgtatgaggtgtaacaaaattggaaacaatagccatgcaaggtgaagaatgtcaccaactcagaaacccttcttcattgacgtgtccctcactcactctcctctcttcactataaatcgccactcttcgtgttctccacttcaccaactccttcaaacttattaacactttccttagttcaatatggggaagcccttcttcactctctctctttcttccctttgcttgctactcttgtcgagtgcatgctttgctattacctccagcaagtgccaactcaacaacctcaacgcgttggaacccgaccaccgcgttgagtccgaaggtggtcttattgaaacatggaactctcaacaccctgagctgcaatgcgccggtgtcactgtttccaaacgcaccctcaaccgcaacggcctccacttgccatcttactcaccttatccccaaatgatcattgtcgttcaaggtgcgtaatattagtaagaagtatttatcagcttaacgtgataacaataatagtaatatgaaatatttattaaatttttataattaatctctgctagaaaatttgattaatcattttagtagaatttgttttctcaactaggtttttaaaacacca

SEQ ID NO: 5503 - DNA, 514 bp, Artificial
  Mutations within GlyA3B4 introduced by GmGlyA3B4_T03TALE nuclease
gttcatgtacggttgcagatataaacgaagcatagcttatgtatgaggtgtaacaaaattggaaacaatagccatgcaaggtgaagaatgtcaccaactcagaaacccttcttcattgacgtgtccctcactcactctcctctcttcactataaatcgccactcttcgtgttctccacttcaccaactccttcaaacttattaacactttccttagttcaatatggggaagcccttcttcactctctctctttcttccctttgcttgctactcttgtcgagtgcatgctttgctattacctctcaacaccctgagctgcaatgcgccggtgtcactgttccaaacgcaccctcaacgcaacggcctccacttgccatcttactcaccttatccccaaatgatcattgtcgttcaaggtgcgtaatattagtaagaagtatttatcagcttaacgtgataacaataatagtaatatgaaatatttattaaattttttataattcaatctctgcta

SEQ ID NO: 5504 - DNA, 650 bp, Artificial; identical to SEQ ID NO: 5501
  Mutations within GlyA3B4 introduced by GmGlyA3B4_T03TALE nuclease

SEQ ID NO: 5505 - DNA, 609 bp, Artificial
  Mutations within GlyA3B4 introduced by GmGlyA3B4_T03TALE nuclease
gttcatgtacggttgcagatataaacgaagcatagcttatgtatgaggtgtaacaaaattggaaacaatagccatgcaaggtgaagaatgtcaccaactcagaaacccttcttcattgacgtgtccctcactcactctcctctcttcactataaatcgccactcttcgtgttctccacttcaccaactccttcaaacttattaacactttccttagttcaatatggggaagcccttcttcactctctctctttcttccctttgcttgctactcttgtcgagtgcatgctttgctattacctccagcaagttcaacgcgttgagtccgaaggtggtcttattgaaacatggaactctcaacaccctgagctgcaatgcgccggtgtcactgtttccaaacgcaccctcaaccgcaacggcctccacttgccatcttactcaccttatccccaaatgatcattgtcgttcaaggtgcgtaatattagtaagaagtatttatcagcttaacgtgataacaataatagtaatatgaaatatttattaatttttataattaatctctgctagaaatttgattaatcatttttagtagaatttgtttttctcaac

SEQ ID NO: 5506 - DNA, 668 bp, Artificial; identical to SEQ ID NO: 5279
  Mutations within GlyA3B4 introduced by GmGlyA3B4_T03TALE nuclease

SEQ ID NO: 5507 - DNA, 645 bp, Artificial
  Mutations within GlyA3B4 introduced by GmGlyA3B4_T03TALE nuclease
gttcatgtacggttgcagatataaacgaagcatagcttatgtatgaggtgtaacaaaattggaaacaatagccatgcaaggtgaagaatgtcaccaactcagaaacccttcttcattgacgtgtccctcactcactctcctctcttcactataaatcgccactcttcgtgttctccacttcaccaactccttcaaacttattaacactttccttagttcaatatggggaagcccttcttcactctctctctttcttccctttgcttgctactcttgtcgagtgcatgctttgctattacctccagcaagagtgccaactcaacaacctcaacgcgttggaacccgaccaccgcgttgagtccgaaggtggtcttattgaaacatggaactctcaacaccctgagctgcaatgcgccggtgtcactgtttccaaacgcaccctcaaccgcaacggcctccacttgccatcttactcaccttatccccaaatgatcattgtcgttcaaggtgcgtaatattagtaagaagtatttatcagcttaacgtgataacaataatagtaatatgaaatatttattaaatttttataattaatctctgctagaaaatttgattaatcattttagtagaatttgttttctcaac

SEQ ID NO: 5508 - DNA, 500 bp, Artificial
  Mutations within GlyA3B4 introduced by GmGlyA3B4_T03TALE nuclease
gttcatgtacggttgcagatataaacgaagcatagcttatgtatgaggtgtaacaaaattggaaacaatagccatgcaaggtgaagaatgtcaccaactcagaaacccttcttcattgacgtgtccctcactcactctcctctcttcactataaatcgccactcttcgtgttctccacttcaccaactccttcaaacttattaacactttccttagttcaatatggggaagcccttcttcactctctctctttcttccctttgcttgctactcttattgagagagagtccgaaggtggtcttattgaaacatggaactctcaacaccctgagctgcaatgcgccggtgtcactgtttccaaacgcaccctcaaccgcaacggcctccacttgccatcttactcaccttatccccaaatgatcattgtcgttcaaggtgcgtaatattagtaagaagtatttatcagcttaacgtgataacaataatagtaatatgaaata

SEQ ID NO: 5509 - DNA, 535 bp, Artificial
  Mutations within GlyA3B4 introduced by GmGlyA3B4_T03TALE nuclease
gttcatgtacggttgcagatataaacgaagcatagcttatgtatgaggtgtaacaaaattggaaacaatagccatgcaaggtgaagaatgtcaccaactcagaaacccttcttcattgacgtgtccctcactcactctcctctcttcactataaatcgccactcttcgtgttctccacttcaccaactccttcaaacttattaacactttccttagttcaatatggggaagcccttcttcactctctctctttcttccctttgcttgctactcttgtcgagtgcatgctttgctattattagtaaagggaacccgaccaccgcgttgagtccgaaggtggtcttattgaaacatggaactctcaacaccctgagctgcaatgcgccggtgtcactgtttccaaacgcaccctcaaccgcaacggcctccacttgccatcttactcaccttatcccccaaatgatcattgtcgttcaaggtgcgtaatattagtaagaagtatttatcagcttaacgtgataacaataatagtaat

SEQ ID NO: 5510 - DNA, 637 bp, Artificial; identical to SEQ ID NO: 5307
  Mutations within GlyA3B4 introduced by GmGlyA3B4_T03TALE nuclease

SEQ ID NO: 5511 - DNA, 622 bp, Artificial
  Mutations within GlyA3B4 introduced by GmGlyA3B4_T03TALE nuclease
gttcatgtacggttgcagatataaacgaagcatagcttatgtatgaggtgtaacaaaattggaaacaatagccatgcaaggtgaagaatgtcaccaactcagaaacccttcttcattgacgtgtccctcactcactctcctctcttcactataaatcgccactcttcgtgttctccacttcaccaactccttcaaacttattaacactttccttagttcaatatggggaagcccttcttcactctctctctttcttccctttgcttgctactcttgtcgagtgcatgctttgctattacctccagcaagttcaacaacctcaacgcgttggaacccgaccaccgcgttgagtccgaaggtggtcttattgaaacatggaactctcaacaccctgagctgcaatgcgccggtgtcactgtttccaacgcacctcaaccgcaacggcctccacttgccatcttactcaccttatccccaaatgatcattgtcgttcaaggtgcgtaatattagtaagaagtatttatcagcttaacgtgataacaataatagtaatatgaaatatttattaaattttttataattaatctctgctagaaaatttgattaatctttttagtagaa

SEQ ID NO: 5512 - DNA, 534 bp, Artificial; identical to SEQ ID NO: 5131
  Mutations within GlyA3B4 introduced by GmGlyA3B4_T03TALE nuclease

SEQ ID NO: 5513 - DNA, 635 bp, Artificial; identical to SEQ ID NO: 5186
  Mutations within GlyA3B4 introduced by GmGlyA3B4_T03TALE nuclease

SEQ ID NO: 5514 - DNA, 646 bp, Artificial
  Mutations within GlyA3B4 introduced by GmGlyA3B4_T03TALE nuclease
gttcatgtacggttgcagatataaacgaagcatagcttatgtatgaggtgtaacaaaattggaaacaatagccatgcaaggtgaagaatgtcaccaactcagaaacccttcttcattgacgtgtccctcactcactctcctctcttcactataaatcgccactcttcgtgttctccacttcaccaactccttcaaacttattaacactttccttagttcaatatggggaagcccttcttcactctctctctttcttccctttgcttgctactcttgtcgagtgcatgctttgctattacctcccgagtgccaactcaacaacctcaacgcgttggaacccgaccaccgcgttgagtccgaaggtggtcttattgaaacatggaactctcaacaccctgagctgcaatgcgccggtgtcactgtttccaaacgcaccctcaaccgcaacggcctccacttgccatcttactcaccttatccccaaatgatcattgtcgttcaaggtgcgtaatattagtaagaagtatttatcagcttaacgtgataacaataatagtaatatgaaatatttattaaatttttataattaatctctgctagaaaatttgattaatcattttagtagaatttgtttttctcaactagg

SEQ ID NO: 5515 - DNA, 621 bp, Artificial
  Mutations within GlyA3B4 introduced by GmGlyA3B4_T03TALE nuclease
gttcatgtacggttgcagatataaacgaagcatagcttatgtatgaggtgtaacaaaattggaaacaatagccatgcaaggtgaagaatgtcaccaactcagaaacccttcttcattgacgtgtccctcactcactctcctctcttcactataaatcgccactcttcgtgttctccacttcaccaactccttcaaacttattaacactttccttagttcaatatggggaagcccttcttcactctctctctttcttccctttgcttgctactcttgtcgaagtgccaactcaacaacctcaacgcgttggaacccgaccaccgcgttgagtcccgaaggtggtcttattgaaacatggaactctcaacaccctgagctgcaatgcgccggtgtcactgtttccaaacgcaccctcaaccgcaacggcctccacttgccatcttactcaccttatccccaaatgatcattgtcgttcaaggtgcgtaatattagtaagaagtatttatcagcttaacgtgataacaataatagtaatatgaaatatttattaaattttttataatttaatctctgctagaaaatttgattaatcatttttagtagaatttgtttttctcaac

SEQ ID NO: 5516 - DNA, 666 bp, Artificial
  Mutations within GlyA3B4 introduced by GmGlyA3B4_T03TALE nuclease
gttcatgtacggttgcagatataaacgaagcatagcttatgtatgaggtgtaacaaaattggaaacaatagccatgcaaggtgaagaatgtcaccaactcagaaacccttcttcattgacgtgtccctcactcactctcctctcttcactataaatcgccactcttcgtgttctccacttcaccaactccttcaaacttattaacactttccttagttcaatatggggaagcccttcttcactctctctctttcttccctttgcttgctactcttgtcgagtgcatgctttgctattacctccagcaagtcgagtgccaactcaacaacctcaacgcgttggaacccgaccaccgcgttgagtccgaaggtggtcttattgaaacatggaactctcaacaccctgagctgcaatgcgccggtgtcactgtttccaaacgcaccctcaaccgcaacggcctccacttgccatcttactcaccttatccccaaatgatcattgtcgttcaaggtgcgtaatattagtaagagtatttatcagcttaacgtgataacaataatagtaatatgaaatatttattaaatttttataattaatctctgctagaaaatttgattaatcattttagtagaatttgttttctcaactaggttttaaaacaccaca

SEQ ID NO: 5517 - DNA, 656 bp, Artificial; identical to SEQ ID NO: 5129
  Mutations within GlyA3B4 introduced by GmGlyA3B4_T03TALE nuclease

SEQ ID NO: 5518 - DNA, 619 bp, Artificial; identical to SEQ ID NO: 2393
  Mutations within GlyA3B4 introduced by GmGlyA3B4_T03TALE nuclease

SEQ ID NO: 5519 - DNA, 634 bp, Artificial
  Mutations within GlyA3B4 introduced by GmGlyA3B4_T03TALE nuclease
gttcatgtacggttgcagatataaacgaagcatagcttatgtatgaggtgtaacaaaattggaaacaatagccatgcaaggtgaagaatgtcaccaactcagaaacccttcttcattgacgtgtccctcactcactctcctctcttcactataaatcgccactcttcgtgttctccacttcaccaactccttcaaacttattaacactttccttagttcaatatggggaagcccttcttcactctctctctttcttccctttgcttgctactcttgtcgagtgcatgctttgctattacctccagcaagtgccaactcaacaacctcaacgcgttggaacccgaccaccgcgttgagtccgaaggtggtcttattgaaacatggaactctcaacaccctgagctgcaatgcgccggtgtcactgtttccaaacgcaccctcaaccgcaacggcctccacttgccatcttactcaccttatccccaaatgatcattgtcgttcaaggtgcgtaatattagtaagaagtatttatcagcttaacgtgataacaataatagtaatatgaaatatttattaaatttttataattaatctctgctagaaaatttgattaatcatttttagtagaatttg

SEQ ID NO: 5520 - DNA, 641 bp, Artificial
  Mutations within GlyA3B4 introduced by GmGlyA3B4_T03TALE nuclease
  misc_feature (549): n is a or c or t or g
gttcatgtacggttgcagatataaacgaagcatagcttatgtatgaggtgtaacaaaattggaaacaatagccatgcaaggtgaagaatgtcaccaactcagaaacccttcttcattgacgtgtccctcactcactctcctctcttcactataaatcgccactcttcgtgttctccacttcaccaactccttcaaacttattaacactttccttagttcaatatggggaagcccttcttcactctctctctttcttccctttgcttgctactcttgtcgagtgcatgctttgctattacctccaacaacctcaacgcgttggaacccgaccaccgcgttgagtccgaaggtggtcttattgaaacatggaactctcaacaccctgagctgcaatgcgccggtgtcactgtttccaaacgcaccctcaaccgcaacggcctccacttgccatcttactcaccttatcccccaaatgatcattgtcgttcaaggtgcgtaatattagtaagaagtatttatcagcttaacgtgataacaataatagtaatntgaaatatttattaaattttttataattaatctctgctagaaaatttgattaatcatttttagtagaatttgttttttctcaactaggtttt

SEQ ID NO: 5521 - DNA, 660 bp, Artificial; identical to SEQ ID NO: 4831
  Mutations within GlyA3B4 introduced by GmGlyA3B4_T03TALE nuclease

SEQ ID NO: 5522 - DNA, 635 bp, Artificial
  Mutations within GlyA3B4 introduced by GmGlyA3B4_T03TALE nuclease
gttcatgtacggttgcagatataaacgaagcatagcttatgtatgaggtgtaacaaaattggaaacaatagccatgcaaggtgaagaatgtcaccaactcagaaacccttcttcattgacgtgtccctcactcactctcctctcttcactataaatcgccactcttcgtgttctccacttcaccaactccttcaaacttattaacactttccttagttcaatatggggaagcccttcttcactctctctctttcttccctttgcttgctactcttgtcgagtgcatgctttgctattacctccagcaagttcaacaactcaacaacctcaacgcgttggaacccgaccaccgcgttgagtccgaaggtggtcttattgaaacatggaactctcaacaccctgagctgcaatgcgccggtgtcactgtttccaaacgcaccctcaaccgcaacggcctccacttgccatcttactcaccttatccccaaatgatcattgtcgttcaaggtgcgtaatattagtaagaagtatttatcagcttaacgtgataacaataatagtaatatgaaatatttattaaatttttataattaatctctgctagaaaatttgattaatcattttagtagaatttg

SEQ ID NO: 5523 - DNA, 660 bp, Artificial; identical to SEQ ID NO: 4831
  Mutations within GlyA3B4 introduced by GmGlyA3B4_T03TALE nuclease

SEQ ID NO: 5524 - DNA, 644 bp, Artificial
  Mutations within GlyA3B4 introduced by GmGlyA3B4_T03TALE nuclease
gttcatgtacggttgcagatataaacgaagcatagcttatgtatgaggtgtaacaaaaattggaaacaatagccatgcaaggtgaagaatgtcaccaactcagaaacccttcttcattgacgtgtccctcactcactctcctctcttcactataaatcgccactcttcgtgttctccacttcaccaactccttcaaacttattaacactttccttagttcaatatggggaagcccttcttcactctctctctttcttccctttgcttgctactcttgtcgagtgcatgctttgctattacctccacgcgttggaacccgaccaccgcgttgagtccgaaggtggtcttattgaaacatggaactctcaacaccctgagctgcaatgcgccggtgtcactgtttccaaacgcaccctcaaccgcaacggcctccacttgccatcttactcaccttatccccaaatgatcattgtcgttcaaggtgcgtaatattagtaagaagtatttatcagcttaacgtgataacaataatagtaatatgaaatattttattaaatttttttataattaatctctgctagaaaatttgattaatcattttttagtagaatttgttttttctcaactaggttttaaacaccaca

SEQ ID NO: 5525 - DNA, 647 bp, Artificial
  Mutations within GlyA3B4 introduced by GmGlyA3B4_T03TALE nuclease
gttcatgtacggttgcagatataaacgaagcatagcttatgtatgaggtgtaacaaaattggaaacaatagccatgcaaggtgaagaatgtcaccaactcagaaacccttcttcattgacgtgtccctcactcactctcctctcttcactataaatcgccactcttcgtgttctccacttcaccaactccttcaaacttattaacactttccttagttcaatatggggaagcccttcttcactctctctctttcttccctttgcttgctactcttgtcgagtgcatgctttgctattacctccagcaagttcaagtgccaactcaacaacctcaacgcgttggaacccgaccaccgcgttgagtccgaaggtggtcttattgaaacatggaactctcaacaccctgagctgcaatgcgccggtgtcactgtttccaaacgcaccctcaaccgcaacggcctccacttgccatcttactcaccttatccccaaatgatcattgtcgttcaaggtgcgtaatattagtaagaagtatttatcagcttaacgtgataacaatatagtaatatgaaatatttattaaatttttataattaatctctgctagaaaatttgattaatcattttagtagaatttgttttctcaa

SEQ ID NO: 5526 - DNA, 660 bp, Artificial
  Mutations within GlyA3B4 introduced by GmGlyA3B4_T03TALE nuclease
gttcatgtacggttgcagatataaacgaagcatagcttatgtatgaggtgtaacaaaattggaaacaatagccatgcaaggtgaagaatgtcaccaactcagaaacccttcttcattgacgtgtccctcactcactctcctctcttcactataaatcgccactcttcgtgttctccacttcaccaactccttcaaacttattaacactttccttagttcaatatggggaagcccttcttcactctctctctttcttccctttgcttgctactcttgtcgagtgcatgctttgctattacctccagcgagtgccaactcaacaacctcaacgcgttggaacccgaccaccgcgttgagtccgaaggtggtcttattgaaacatggaactctcaacaccctgagctgcaatgcgccggtgtcactgtttccaaacgcaccctcaaccgcaacggcctccacttgccatcttactcaccttatccccaaatgatcattgtcgttcaaggtgcgtaatattagtaagaagtatttatcagcttaacgtgataacaataatagtaatatgaaatatttattaaatttttataattaatctctgctagaaaatttgattaatcattttagtagaatttgttttctcaactaggttttaaaacacca

SEQ ID NO: 5527 - DNA, 628 bp, Artificial
  Mutations within GlyA3B4 introduced by GmGlyA3B4_T03TALE nuclease
gttcatgtacggttgcagatataaacgaagcatagcttatgtatgaggtgtaacaaaattggaaacaatagccatgcaaggtgaagaatgtcaccaactcagaaacccttcttcattgacgtgtccctcactcactctcctctcttcactataaatcgccactcttcgtgttctccacttcaccaactccttcaaacttattaacactttccttagttcaatatggggaagcccttcttcactctctctctttcttccctttgcttgctactcttgtcgagtgcatgctttgctattacctccagtgccaactcaacaacctcaacgcgttggaacccgaccaccgcgttgagtccgaaggtggtcttattgaacatggaactctcaacaccctgagctgcaatgcgccggtgtcactgtttccaaacgcaccctcaaccgcaacggcctccacttgccatcttactcaccttatccccaaatgatcattgtcgttcaaggtgcgtaatattagtaagaagtatttatcagcttaacgtgataacaataatagtaatatgaaatatttattaaatttttataattaatctctgctagaaaatttgattaatcattttagtagaatttg

SEQ ID NO: 5528 - DNA, 552 bp, Artificial
  Mutations within GlyA3B4 introduced by GmGlyA3B4_T03TALE nuclease
gttcatgtacggttgcagatataaacgaagcatagcttatgtatgaggtgtaacaaaattggaaacaatagccatgcaaggtgaagaatgtcaccaactcagaaacccttcttcattgacgtgtccctcactcactctcctctcttcactataaatcgccactcttcgtgttctccacttcaccaactccttcaaacttattaacactttccttagttcaataatggaacccgaccaccgcgttgagtccgaaggtggtcttattgaacatggaactctcaacaccctgagctgcaatgcgccggtgtcactgtttccaaacgcaccctcaaccgcaacggcctccacttgccatcttactcaccttatccccaaatgatcattgtcgttcaaggtgcgtaatattagtaagaagtatttatcagcttaacgtgataacaataatagtaatatgaaatatttattaaattttttataattaatctctgctagaaaatttgattaatcatttttagtagaatttgttttttctcaactaggttttaaacacca

SEQ ID NO: 5529 - DNA, 664 bp, Artificial; identical to SEQ ID NO: 4996
  Mutations within GlyA3B4 introduced by GmGlyA3B4_T03TALE nuclease

SEQ ID NO: 5530 - DNA, 629 bp, Artificial
  Mutations within GlyA3B4 introduced by GmGlyA3B4_T03TALE nuclease
gttcatgtacggttgcagatataaacgaagcatagcttatgtatgaggtgtaacaaaattggaaacaatagccatgcaaggtgaagaatgtcaccaactcagaaacccttcttcattgacgtgtccctcactcactctcctctcttcactataaatcgccactcttcgtgttctccacttcaccaactccttcaaacttattaacactttccttagttcaatatggggaagcccttcttcactctctctctttcttccctttgcttgctactcttgtcgagtgccaactcaacaacctcaacgcgttggaacccgaccaccgcgttgagtccgaaggtggtcttattgaaacatggaactctcaacaccctgagctgcaatgcgccggtgtcactgtttccaaaacgcaccctcaaccgcaacggcctccacttgccatcttactcaccttatccccaaatgatcattgtcgttcaaggtgcgtaatattagtaagaagtatttatcagcttaacgtgataacaataatagtaatatgaaatatttattaaattttttataatttaatctctgctagaaaatttgattaatcatttttagtagaatttgtttttctcaactaggttttt

SEQ ID NO: 5531 - DNA, 643 bp, Artificial
  Mutations within GlyA3B4 introduced by GmGlyA3B4_T03TALE nuclease
gttcatgtacggttgcagatataaacgaagcatagcttatgtatgaggtgtaacaaaattggaaacaatagccatgcaaggtgaagaatgtcaccaactcagaaacccttcttcattgacgtgtccctcactcactctcctctcttcactataaatcgccactcttcgtgttctccacttcaccaactccttcaaacttattaacactttccttagttcaatatggggaagcccttcttcactctctctctttcttccctttgcttgctactcttgtcgagtgcatgctttgctattacctccagcaacaactcaacaacctcaacgcgttggaacccgaccaccgcgttgagtccgaaggtggtcttattgaaacatggaactctcaacaccctgagctgcaatgcgccggtgtcactgtttccaaacgcaccctcaaccgcaacggcctccacttgccatcttactcaccttatccccaaatgatcattgtcgttcaaggtgcgtaatattagtaagaagtatttatcagcttaacgtgataacaataatagtaatatgaaatatttattaaatttttataattaatctctgctagaaaatttgattaatcattttagtagaatttgttttctcaactagg

SEQ ID NO: 5532 - DNA, 661 bp, Artificial
  Mutations within GlyA3B4 introduced by GmGlyA3B4_T03TALE nuclease
gttcatgtacggttgcagatataaacgaagcatagcttatgtatgaggtgtaacaaaattggaaacaatagccatgcaaggtgaagaatgtcaccaactcagaaacccttcttcattgacgtgtccctcactcactctcctctcttcactataaatcgccactcttcgtgttctccacttcaccaactccttcaaacttattaacactttccttagttcaatatggggaagcccttcttcactctctctctttcttccctttgcttgctactcttgtcgagtgcatgctttgctattacctccagcaacgagtgccaactcaacaacctcaacgcgttggaacccgaccaccgcgttgagtccgaaggtggtcttattgaaacatggaactctcaacaccctgagctgcaatgcgccggtgtcactgtttccaaacgcaccctcaaccgcaacggcctccacttgccatcttactcaccttatccccaaatgatcattgtcgttcaaggtgcgtaatattagtaagagtatttatcagcttaacgtgataacaatatagtaatatgaaatatttattaaatttttataattaatctctgctagaaaatttgattaatcattttagtagaatttgtttttctcaactaggttttaaacacca

SEQ ID NO: 5533 - DNA, 546 bp, Artificial
  Mutations within GlyA3B4 introduced by GmGlyA3B4_T03TALE nuclease
gttcatgtacggttgcagatataaacgaagcatagcttatgtatgaggtgtaacaaaattggaaacaatagccatgcaaggtgaagaatgtcaccaactcagaaacccttcttcattgacgtgtccctcactcactctcctctcttcactataaatcgccactcttcgtgttctccacttcaccaactccttcaaacttattaacaacctcaacgcgttggaacccgaccaccgcgttgagtccgaaggtggtcttattgaaacatggaactctcaacaccctgagctgcaatgcgccggtgtcactgtttccaaacgcaccctcaaccgcaacggcctccacttgccatcttactcaccttatccccaaatgatcattgtcgttcaaggtgcgtaatattagtaagaagtatttatcagcttaacgtgataacaataatagtaatatgaaatatttattaaattttttataattaatctctgctagaaaatttgattaatcatttttagtagaatttgtttttctcaactaggttttaaacacca

SEQ ID NO: 5534 - DNA, 662 bp, Artificial
  Mutations within GlyA3B4 introduced by GmGlyA3B4_T03TALE nuclease
gttcatgtacggttgcagatataaacgaagcatagcttatgtatgaggtgtaacaaaattggaaacaatagccatgcaaggtgaagaatgtcaccaactcagaaacccttcttcattgacgtgtccctcactcactctcctctcttcactataaatcgccactcttcgtgttctccacttcaccaactccttcaaacttattaacactttccttagttcaatatggggaagcccttcttcactctctctctttcttccctttgcttgctactcttgtcgagtgcatgctttgctattacctccagcaagagtgccaactcaacaacctcaacgcgttggaacccgaccaccgcgttgagtccgaaggtggtcttattgaaacatggaactctcaacaccctgagctgcaatgcgccggtgtcactgtttccaaacgcaccctcaaccgcaacggcctccacttgccatcttactcaccttatccccaaatgatcattgtcgttcaaggtgcgtaatattagtaagaagtatttatcagcttaacgtgataacaataatagtaatatgaaatatttattaaatttttataattaatctctgctagaaaatttgattaatcattttagtagaatttgttttctcaactaggttttaaaacacca

SEQ ID NO: 5535 - DNA, 681 bp, Artificial
  Mutations within GlyA3B4 introduced by GmGlyA3B4_T03TALE nuclease
gttcatgtacggttgcagatataaacgaagcatagcttatgtatgaggtgtaacaaaattggaaacaatagccatgcaaggtgaagaatgtcaccaactcagaaacccttcttcattgacgtgtccctcactcactctcctctcttcactataaatcgccactcttcgtgttctccacttcaccaactccttcaaacttattaacactttccttagttcaatatggggaagcccttcttcactctctctctttcttccctttgcttgctactcttgtcgagtgcatgctttgctattaccccccaatcccttttttcactgcatccagcgcaggacgcccgccgaggcaggccaaggcgacgaggtggtcgacgagtgccaactcaacaacctcaacgcgttggaacccgaccaccgcgttgagtccgaaggtggtcttattgaaacatggaactctcaacaccctgagctgcaatgcgccggtgtcactgtttccaaacgcaccctcaaccgcaacggcctccacttgccatcttactcaccttatccccaaatgatcattgtcgttcaaggtgcgtaatattagtaagaagtatttatcagcttaacgtgataacaataatagtaatatgaaatatttattaaaattttttataattaatctctgctagaaaaatttga

SEQ ID NO: 5536 - DNA, 532 bp, Artificial
  Mutations within GlyA3B4 introduced by GmGlyA3B4_T03TALE nuclease
gttcatgtacggttgcagatataaacgaagcatagcttatgtatgaggtgtaacaaaattggaaacaatagccatgcaaggtgaagaatgtcaccaactcagaaacccttcttcattgacgtgtccctcactcactctcctctcttcactataaatcgccactcttcgtgttctccacttcaccaactcaacaacctcaacgcgttggaacccgaccaccgcgttgagtccgaaggtggtcttattgaaacatggaactctcaacaccctgagctgcaatgcgccggtgtcactgtttccaaacgcaccctcaaccgcaacggcctccacttgccatcttactcaccttatccccaaatgatcattgtcgttcaaggtgcgtaatattagtaagaagtatttatcagcttaacgtgataacaataatagtaatatgaaatatttattaaattttttataattaatctctgctagaaaatttgattaatcatttttagtagaatttgtttttctcaactaggtttaaacacca

SEQ ID NO: 5537 - DNA, 650 bp, Artificial; identical to SEQ ID NO: 5501
  Mutations within GlyA3B4 introduced by GmGlyA3B4_T03TALE nuclease

SEQ ID NO: 5538 - DNA, 663 bp, Artificial
  Mutations within GlyA3B4 introduced by GmGlyA3B4_T03TALE nuclease
gttcatgtacggttgcagatataaacgaagcatagcttatgtatgaggtgtaacaaaattggaaacaatagccatgcaaggtgaagaatgtcaccaactcagaaacccttcttcattgacgtgtccctcactcactctcctctcttcactataaatcgccactcttcgtgttctccacttcaccaactccttcaaacttattaacactttccttagttcaatatggggaagcccttcttcactctctctctttcttccctttgcttgctactcttgtcgagtgcatgctttgctattacctccagcaagttagtgccaactcaacaacctcaacgcgttggaaacccgaccaccgcgttgagtccgaaggtggtcttattgaaacatggaactctcaacaccctgagctgcaatgcgccggtgtcactgtttccaaaacgcaccctcaaccgcaacggcctccaacgttgccatcttcactcaccttatccccaaatgatcattgtcgttcaaggtgcgtaatattagtaagaagtatttatcagcttaacgtgataacaataatagtaatatgaaaatatttattaaaatttttataattaatctctgctagaaaatttgattaatcattttagtagaatttgtttttctcaactaggtttt

SEQ ID NO: 5539 - DNA, 633 bp, Artificial
  Mutations within GlyA3B4 introduced by GmGlyA3B4_T03TALE nuclease
gttcatgtacggttgcagatataaacgaagcatagcttatgtatgaggtgtaacaaaattggaaacaatagccatgcaaggtgaagaatgtcaccaactcagaaacccttcttcattgacgtgtccctcactcactctcctctcttcactataaatcgccactcttcgtgttctccacttcaccaactccttcaaacttattaacactttccttagttcaatatggggaagcccttcttcactctctctctttcttccctttgcttgctactcttgtcgagtgcatgctttgctattacctccagcaagtgccaactcaacaacctcaacgcgttggaacccgaccaccgcgttgagtccgaaggtggtcttattgaaacatggaactctcaacaccctgagctgcaatgcgccggtgtcactgtttccaaacgcaccctcaaccgcaacggcctccacttgccatcttactcaccttatccccaaatgatcattgtcgttcaaggtgcgtaatattagtaagaagtatttatcagcttaacgtgataacaataatagtaatatgaaatatttattaaatttttataattaatctctgctagaaaatttgattaatcattttagtagaatttg

SEQ ID NO: 5540 - DNA, 644 bp, Artificial; identical to SEQ ID NO: 4917
  Mutations within GlyA3B4 introduced by GmGlyA3B4_T03TALE nuclease

SEQ ID NO: 5541 - DNA, 538 bp, Artificial
  Mutations within GlyA3B4 introduced by GmGlyA3B4_T03TALE nuclease
gttcatgtacggttgcagatataaacgaagcatagcttatgtatgaggtgtaacaaaattggaaacaatagccatgcaaggtgaagaatgtcaccaactcagaaacccttcttcattgacgtgtccctcactcactctcctctcttcactataaatcgccactcttcgtgttctccacttcaccaactccttcaaacttattaacactttccttagttcaatatggggaagcccttcttcactctctctctttcttccctttgcttgctactcttgtcgagtgcatgccaactcaacaacctcaacgcgttggaacccgaccaccgcgttgagtccgaaggtggtcttattgaaacatggaactctcaacaccctgagctgcaatgcgccggtgtcactgtttccaaacgcaccctcaaccgcaacggcctccacttgccatcttactcaccttatccccaaatgatcattgtcgttcaaggtgcgtaatattagtaagaagtatttatcagcttaacgtgataacaataatagtaat

SEQ ID NO: 5542 - DNA, 602 bp, Artificial
  Mutations within GlyA3B4 introduced by GmGlyA3B4_T03TALE nuclease
gttcatgtacggttgcagatataaacgaagcatagcttatgtatgaggtgtaacaaaattggaaacaatagccatcgcaaggtgaagaatgtcaccaactcagaaacccttcttcattgacgtgtccctcactcactctcctctcttcactataaatcgccactcttcgtgttctccacttcaccaactccttcaaacttattaacactttccttagttcaatatggggaagcccttcttcactctctctctttcttccctttgcttgctactcttgtcgagtgccaactcaacaacctcaacgcgttggaacccgaccaccgcgttgagtccgaaggtggtcttattgaaacatggaactctcaacaccctgagctgcaatgcgccggtgtcactgtttccaaacgcaccctcaaccgcaacggcctccacttgccatcttactcaccttatccccaaatgatcattgtcgttcaaggtgcgtaatattagtaagaagtatttatcagcttaacgtgataacaataatagtaatatgaaatatttattaaattttttataattaatctctgctagaaaatttgattaatcatttttagtag

SEQ ID NO: 5543 - DNA, 663 bp, Artificial; identical to SEQ ID NO: 4922
  Mutations within GlyA3B4 introduced by GmGlyA3B4_T03TALE nuclease

SEQ ID NO: 5544 - DNA, 663 bp, Artificial
  Mutations within GlyA3B4 introduced by GmGlyA3B4_T03TALE nuclease
gttcatgtacggttgcagatataaacgaagcatagcttatgtatgaggtgtaacaaaattggaaacaatagccatgcaaggtgaagaatgtcaccaactcagaaacccttcttcattgacgtgtccctcactcactctcctctcttcactataaatcgccactcttcgtgttctccacttcaccaactccttcaaacttattaacactttccttagttcaatatggggaagcccttcttcactctctctctttcttccctttgcttgctactcttgtcgagtgcatgctttgctattacctccagcaagagtgccaactcaacaacctcaacgcgttggaacccgaccaccgcgttgagtccgaaggtggtcttattgaaacatggaactctcaacaccctgagctgcaatgcgccggtgtcactgtttccaaacgcaccctcaaccgcaacggcctccacttgccatcttactcaccttatccccaaatgatcattgtcgttcaaggtgcgtaatattagtaagaagtatttatcagcttaacgtgataacaataatagtaatatgaaatatttattaaatttttataattaatctctgctagaaaatttgattaatcattttagtagaatttgttttctcaactaggtttttaaaacacca

SEQ ID NO: 5545 - DNA, 613 bp, Artificial
  Mutations within GlyA3B4 introduced by GmGlyA3B4_T03TALE nuclease
gttcatgtacggttgcagatataaacgaagcatagcttatgtatgaggtgtaacaaaattggaaacaatagccatgcaaggtgaagaatgtcaccaactcagaaacccttcttcattgacgtgtccctcactcactctcctctcttcactataaatcgccactcttcgtgttctccacttcaccaactccttcaaacttattaacactttccttagttcaatatggggaagcccttcttcactctctctctttcttccctttgcttgctactcttgtcgagtgccaactcaacaacctcaacgcgttggaacccgaccaccgcgttgagtccgaaggtggtcttattgaaacatggaactctcaacaccctgagctgcaatgcgccggtgtcactgtttccaaacgcaccctcaaccgcaacggcctccacttgccatcttactcaccttatccccaaatgatcattgtcgttcaaggtgcgtaatattagtaagaagtatttatcagcttaacgtgataacaataatagtaatatgaaatatttattaattttttataattaatctctgctagaaaatttgattaatcatttttagtagaatttgtttttct

SEQ ID NO: 5546 - DNA, 656 bp, Artificial; identical to SEQ ID NO: 5475
  Mutations within GlyA3B4 introduced by GmGlyA3B4_T03TALE nuclease

SEQ ID NO: 5547 - DNA, 644 bp, Artificial
  Mutations within GlyA3B4 introduced by GmGlyA3B4_T03TALE nuclease
gttcatgtacggttgcagatataaacgaagcatagcttatgtatgaggtgtaacaaaattggaaacaatagccatgcaaggtgaagaatgtcaccaactcagaaacccttcttcattgacgtgtccctcactcactctcctctcttcactataaatcgccactcttcgtgttctccacttcaccaactccttcaaacttattaacactttccttagttcaatatggggaagcccttcttcactctctctctttcttccctttgcttgctactcttgtcgagtgcatgctttgctattacctccagcaagtttgccaactcaacaacctcaacgcgttggaacccgaccaccgcgttgagtccgaaggtggtcttattgaaacatggaactctcaacaccctgagctgcaatgcgccggtgtcactgtttccaaacgcaccctcaaccgcaacggcctccacttgccatcttactcaccttatccccaaatgatcattgtcgttcaaggtgcgtaatattagtaagaagtatttatcagcttaacgtgataacaataatagtaatatgaaatatttattaaatttttataatttaatctctgctagaaatttgattaatcattttagtagaatttgttttctcaa

SEQ ID NO: 5548 - DNA, 646 bp, Artificial; identical to SEQ ID NO: 4907
  Mutations within GlyA3B4 introduced by GmGlyA3B4_T03TALE nuclease

SEQ ID NO: 5549 - DNA, 533 bp, Artificial
  Mutations within GlyA3B4 introduced by GmGlyA3B4_T03TALE nuclease
gttcatgtacggttgcagatataaacgaagcatagcttatgtatgaggtgtaacaaaattggaaacaatagccatgcaaggtgaagaatgtcaccaactcagaaacccttcttcattgacgtgtccctcactcactctcctctcttcactataaatcgccactcttcgtgttctccacttcaccaactcaacaacctcaacgcgttggaacccgaccaccgcgttgagtccgaaggtggtcttattgaaacatggaactctcaacaccctgagctgcaatgcgccggtgtcactgtttccaaacgcaccctcaaccgcaacggcctccacttgccatcttactcaccttatccccaaatgatcattgtcgttcaaggtgcgtaatattagtaagaagtatttatcagcttaacgtgataacaataatagtaatatgaaatatttattaaattttttataattaatctctgctagaaaatttgattaatcatttttagtagaatttgtttttctcaactaggttttaaacacca

SEQ ID NO: 5550 - DNA, 633 bp, Artificial
  Mutations within GlyA3B4 introduced by GmGlyA3B4_T03TALE nuclease
gttcatgtacggttgcagatataaacgaagcatagcttatgtatgaggtgtaacaaaattggaaacaatagccatgcaaggtgaagaatgtcaccaactcagaaacccttcttcattgacgtgtccctcactcactctcctctcttcactataaatcgccactcttcgtgttctccacttcaccaactccttcaaacttattaacactttccttagttcaatatggggaagcccttcttcactctctctctttcttccctttgcttgctactcttgtcgagtgcatgcagtgccaactcaacaacctcaacgcgttggaacccgaccaccgcgttgagtccgaaggtggtcttattgaaacatggaactctcaacaccctgagctgcaatgcgccggtgtcactgtttccaaacgcaccctcaaccgcaacggcctccacttgccatcttactcaccttatcccccaaatgatcattgtcgttcaaggtgcgtaatattagtaagaagtatttatcagcttaacgtgataacaataatagtaatatgaaatatttattaaattttttataattaatctctgctagaaaatttgattaatcatttttagtagaatttgttttttctcaactagg

SEQ ID NO: 5551 - DNA, 620 bp, Artificial
  Mutations within GlyA3B4 introduced by GmGlyA3B4_T03TALE nuclease
gttcatgtacggttgcagatataaacgaagcatagcttatgtatgaggtgtaacaaaattggaaacaatagccatgcaaggtgaagaatgtcaccaactcagaaacccttcttcattgacgtgtccctcactcactctcctctcttcactataaatcgccactcttcgtgttctccacttcaccaactccttcaaacttattaacactttccttagttcaatatggggaagcccttcttcactctctctctttcttccctttgcttgctactcttgtcgagtgcatgctttgctattacctccagcaagaagtgccaactcaacaacctcaacgcgttggaacccgaccaccgcgttgagtccgaaggtggtcttattgaaacatggaactctcaacaccctgagctgcaatgcgccggtgtcactgtttccaaacgcaccctcaaccgcaacggcctccacttgccatcttactcaccttatccccaaatgatcattgtcgttcaaggtgcgtaatattagtaagaagtatttatcagcttaacgtgataacaatatagtaatatgaaatatttattaaatttttataattaatctctgctagaaaatttgattaatca

SEQ ID NO: 5552 - DNA, 645 bp, Artificial
  Mutations within GlyA3B4 introduced by GmGlyA3B4_T03TALE nuclease
gttcatgtacggttgcagatataaacgaagcatagcttatgtatgaggtgtaacaaaattggaaacaatagccatgcaaggtgaagaatgtcaccaactcagaaacccttcttcattgacgtgtccctcactcactctcctctcttcactataaatcgccactcttcgtgttctccacttcaccaactccttcaaacttattaacactttccttagttcaatatggggaagcccttcttcactctctctctttcttccctttgcttgctactcttgtcgagtgcatgctttgctattacctccagcaagttcaacgactcaacaacctcaacgcgttggaacccgaccaccgcgttgagtccgaaggtggtcttattgaaacatggaactctcaacaccctgagctgcaatgcgccggtgtcactgtttccaaacgcaccctcaaccgcaacggcctccacttgccatcttactcaccttatccccaaatgatcattgtcgttcaaggtgcgtaatattagtaagaagtatttatcagcttaacgtgataacaataatagtaatatgaaatatttattaaatttttataatttaatctctgctagaaaatttgattaatcattttagtagaatttgttttctcaa

SEQ ID NO: 5553 - DNA, 658 bp, Artificial
  Mutations within GlyA3B4 introduced by GmGlyA3B4_T03TALE nuclease
gttcatgtacggttgcagatataaacgaagcatagcttatgtatgaggtgtaacaaaattggaaacaatagccatgcaaggtgaagaatgtcaccaactcagaaacccttcttcattgacgtgtccctcactcactctcctctcttcactataaatcgccactcttcgtgttctccacttcaccaactccttcaaacttattaacactttccttagttcaatatggggaagcccttcttcactctctctctttcttccctttgcttgctactcttgtcgagtgcatgctttgctattacctccagcaagttcgagtgccaactcaacaacctcaacgcgttggaacccgaccaccgcgttgagtccgaaggtggtcttattgaaacatggaactctcaacaccctgagctgcaatgcgccggtgtcactgtttccaaacgcaccctcaaccgcaacggcctccacttgccatcttactcaccttatccccaaatgatcattgtcgttcaaggtgcgtaatattagtaagagtatttatcagcttaacgtgataacaatatagtaatatgaaatatttattaaatttttataattaatctctgctagaaaatttgattaatcattttagtagaatttgttttctcaactaggttttaaa

SEQ ID NO: 5554 - DNA, 690 bp, Artificial
  Mutations within GlyA3B4 introduced by GmGlyA3B4_T03TALE nuclease
gttcatgtacggttgcagatataaacgaagcatagcttatgtatgaggtgtaacaaaattggaaacaatagccatgcaaggtgaagaatgtcaccaactcagaaacccttcttcattgacgtgtccctcactcactctcctctcttcactataaatcgccactcttcgtgttctccacttcaccaactccttcaaacttattaacactttccttagttcaatatggggaagcccttcttcactctctctctttcttccctttgcttgctactcttgtcgagtgcatgctttgctattacctccagcaagttcatctcataataacgtcatgcattacatgttaattattacatgcttaacgtaattcaacacgagtgccaactcaacaacctcacgcgttggaacccgaccaccgcgttgagtccgaaggtggtcttattgaaacatggaactctcaacaccctgagctgcaatgcgccggtgtcactgtttccaaacgcaccctcaaccgcaacggcctccacttgccatcttactcaccttatccccaaatgatcattgtcgttcaaggtgcgtaatattagtaagaagtatttatcagcttaacgtgatacaataatagtaatatgaaatatttattaattttttataattaatctctgctagaaaatttgattaatcatttttagt

SEQ ID NO: 5555 - DNA, 659 bp, Artificial
  Mutations within GlyA3B4 introduced by GmGlyA3B4_T03TALE nuclease
gttcatgtacggttgcagatataaacgaagcatagcttatgtatgaggtgtaacaaaattggaaacaatagccatgcaaggtgaagaatgtcaccaactcagaaacccttcttcattgacgtgtccctcactcactctcctctcttcactataaatcgccactcttcgtgttctccacttcaccaactccttcaaacttattaacactttccttacttcaatatggggaagcccttcttcactctctctctttcttccctttgcttgctactcttgtcgagtgcatgctttgctattacctccagcaagtagtgccaactcaacaacctcaacgcgttggaacccgaccaccgcgttgagtccgaaggtggtcttattgaaacatggaactctcaacaccctgagctgcaatgcgccggtgtcactgtttccaaacgcaccctcaccgcaacggcctccacttgccatcttactcaccttatccccaaatgatcattgtcgttcaaggtgcgtaatattagtaagaagtatttatcagcttaacgtgatacaatatagtaatatgaaatatttattaaatttttataattaatctctgctagaaaatttgattaatcattttagtagaatttgttttctcaactaggttttaaacacca

SEQ ID NO: 5556 - DNA, 647 bp, Artificial
  Mutations within GlyA3B4 introduced by GmGlyA3B4_T03TALE nuclease
gttcatgtacggttgcagatataaacgaagcatagcttatgtatgaggtgtaacaaaattggaaacaatagccatgcaaggtgaagaatgtcaccaactcagaaacccttcttcattgacgtgtccctcactcactctcctctcttcactataaatcgccactcttcgtgttctccacttcaccaactccttcaaacttattaacactttccttagttcaatatggggaagcccttcttcactctctctctttcttccctttgcttgctactcttgtcgagtgcatgctttgctattacctccagcaagttagtgccaactcaacaacctcaacgcgttggaacccgaccaccgcgttgagtccgaaggtggtcttattgaaacatggaactctcaacaccctgagctgcaatgcgccggtgtcactgtttccaaacgcaccctcaaccgcaacggcctccacttgccatcttactcaccttatccccaaatgatcattgtcgttcaaggtgcgtaatattagtaagaagtatttatcagcttaacgtgataacaataatagtaatatgaaatatttattaaatttttataatttaatctctgctagaaaatttgattaatcattttagtagaatttgttttctcaa

SEQ ID NO: 5557 - DNA, 659 bp, Artificial; identical to SEQ ID NO: 5109
  Mutations within GlyA3B4 introduced by GmGlyA3B4_T03TALE nuclease

SEQ ID NO: 5558 - DNA, 655 bp, Artificial
  Mutations within GlyA3B4 introduced by GmGlyA3B4_T03TALE nuclease
gttcatgtacggttgcagatataaacgaagcatagcttatgtatgaggtgtaacaaaattggaaacaatagccatgcaaggtgaagaatgtcaccaactcagaaacccttcttcattgacgtgtccctcactcactctcctctcttcactataaatcgccactcttcgtgttctccacttcaccaactccttcaaacttattaacactttccttagttcaatatggggaagcccttcttcactctctctctttcttccctttgcttgctactcttgtcgagtgcatgctttgctattacctccagccaactcaacaacctcaacgcgttggaacccgaccaccgcgttgagtccgaaggtggtcttattgaaacatggaactctcaacaccctgagctgcaatgcgccggtgtcactgtttccaaacgcaccctcaaccgcaacggcctccacttgccatcttactcaccttatccccaaatgatcattgtcgttcaaggtgcgtaatattagtaagaagtatttatcagcttaacgtgataacaataatagtaatatgaaatatttattaaatttttataattaatctctgctagaaaatttgattaatcattttagtagaatttgtttttctcaactaggttttaaaacacca

SEQ ID NO: 5559 - DNA, 658 bp, Artificial; identical to SEQ ID NO: 5081
  Mutations within GlyA3B4 introduced by GmGlyA3B4_T03TALE nuclease

SEQ ID NO: 5560 - DNA, 441 bp, Artificial
  Mutations within GlyA3B4 introduced by GmGlyA3B4_T03TALE nuclease
gttcatgtacggttgcagatataaacgaagcatagcttatgtatgaggtgtaacaaaattggaaacaatagccatgcaaggtgaagaatgtcaccaactcagaaacccttcttcattgacgtgtccctcactcactctcctctcttcactataaatcgccactcttcgtgttctccacttcaccaactccttcaaacttattaacactttccttagttcaatatggggaagcccttcttcactctctctctttcttccctttgcttgctactcttgtcgagtgcatgctttgctattacctccagcaagttcaatgccaactcaacaacctcaacgcgttggaacccgaccaccgcgttgagtccgaaggtggtcttattgaaacatggaactctcaacaccctgagctgcaatgcgccggtgtcactgtttccaaacgca

SEQ ID NO: 5561 - DNA, 664 bp, Artificial
  Mutations within GlyA3B4 introduced by GmGlyA3B4_T03TALE nuclease
gttcatgtacggttgcagatataaacgaagcatagcttatgtatgaggtgtaacaaaattggaaacaatagccatgcaaggtgaagaatgtcaccaactcagaaacccttcttcattgacgtgtccctcactcactctcctctcttcactataaatcgccactcttcgtgttctccacttcaccaactccttcaaacttattaacactttccttagttcaatatggggaagcccttcttcactctctctctttcttccctttgcttgctactcttgtcgagtgcatgctttgctattacctccagcaagttgcactactaacaacctcaacgcgttggaacccagaccaccgcgttgagtccgaaggtggtcttattgaaacatggaactctcaacaccctgagctgcaatgcgccggtgtcactgtttccaaacgcaccctcaaccgcaacggcctccacttgccatcttactcaccttatccccaaatgatcattgtcgttcaaggtgcgtaatattagtaagaagtatttatcagcttaacgtgataacaataatagtaatatgaaatatttattaaatttttataattaatctctgctagaaaatttgattaatcattttagtagaatttgtttttctcaactaggtttttaaaacacca

SEQ ID NO: 5562 - DNA, 636 bp, Artificial; identical to SEQ ID NO: 5104
  Mutations within GlyA3B4 introduced by GmGlyA3B4_T03TALE nuclease

SEQ ID NO: 5563 - DNA, 618 bp, Artificial; identical to SEQ ID NO: 4827
  Mutations within GlyA3B4 introduced by GmGlyA3B4_T03TALE nuclease

SEQ ID NO: 5564 - DNA, 625 bp, Artificial
  Mutations within GlyA3B4 introduced by GmGlyA3B4_T03TALE nuclease
gttcatgtacggttgcagatataaacgaagcatagcttatgtatgaggtgtaacaaaattggaaacaatagccatgcaaggtgaagaatgtcaccaactcagaaacccttcttcattgacgtgtccctcactcactctcctctcttcactataaatcgccactcttcgtgttctccacttcaccaactccttcaaacttattaacactttccttagttcaatatggggaagcccttcttcactctctctctttcttccctttgcttgctactcttgtcgagtgcatgctttgctattacctccagcaagttcaaagtgccaactcaacaacctcaacgcgttggaacccgaccaccgcgttgagtccgaaggtggtcttattgaaacatggaactctcaacaccctgagctgcaatgcgccggtgtcactgtttccaaacgcaccctcaaccgcaacggcctccacttgccatcttactcaccttatccccaaatgatcattgtcgttcaaggtgcgtaatattagtaagaagtatttatcagcttaacgtgataacaataatagtaatatgaaatatttattaaatttttataattaatctctgctagaaaatttgattaatca

SEQ ID NO: 5565 - DNA, 635 bp, Artificial
  Mutations within GlyA3B4 introduced by GmGlyA3B4_T03TALE nuclease
gttcatgtacggttgcagatataaacgaagcatagcttatgtatgaggtgtaacaaaattggaaacaatagccatgcaaggtgaagaatgtcaccaactcagaaacccttcttcattgacgtgtccctcactcactctcctctcttcactataaatcgccactcttcgtgttctccacttcaccaactccttcaaacttattaacactttccttagttcaatatggggaagcccttcttcactctctctctttcttccctttgcttgctactcttgtcgagtgcatgctttgctattacctccagcaagtgtgccaactcaacaacctcaacgcgttggaacccgaccaccgcgttgagtccgaaggtggtcttattgaaacatggaactctcaacaccctgagctgcaatgcgccggtgtcactgtttccaaacgcaccctcaaccgcaacggcctccacttgccatcttactcaccttatccccaaatgatcattgtcgttcaaggtgcgtaatattagtaagaagtatttatcagcttaacgtgataacaataatagtaatatgaaatatttattaaatttttataattaatctctgctagaaaatttgattaatcattttagtagaatttg

SEQ ID NO: 5566 - DNA, 629 bp, Artificial
  Mutations within GlyA3B4 introduced by GmGlyA3B4_T03TALE nuclease
gttcatgtacggttgcagatataaacgaagcatagcttatgtatgaggtgtaacaaaattggaaacaatagccatgcaaggtgaagaatgtcaccaactcagaaacccttcttcattgacgtgtccctcactcactctcctctcttcactataaatcgccactcttcgtgttctccacttcaccaactccttcaaacttattaacactttccttagttcaatatggggaagcccttcttcactctctctctttcttccctttgcttgctactcttgtcgagtgccaactcaacaacctcacgcgttggaacccgaccaccgcgttgagtccgaaggtggtcttattgaacatggaactctcaacaccctgagctgcaatgcgccggtgtcactgtttccaaacgcaccctcaaccgcaacggcctccacttgccatcttactcaccttatccccaaatgatcattgtcgttcaaggtgcgtaatattagtaagaagtatttatcagcttaacgtgataacaataatagtaatatgaaatatttattaattttttataattaatctctgctagaaaatttgattaatcatttttagtagaatttgtttttctcaactaggtttttaaaca

SEQ ID NO: 5567 - DNA, 661 bp, Artificial
  Mutations within GlyA3B4 introduced by GmGlyA3B4_T03TALE nuclease
gttcatgtacggttgcagatataaacgaagcatagcttatgtatgaggtgtaacaaaattggaaacaatagccatgcaaggtgaagaatgtcaccaactcagaaaccccttcttcattgacgtgtccctcactcactctcctctcttcactataaatcgccactcttcgtgttctccacttcaccaactccttcaaacttattaacactttccttagttcaatatggggaagcccttcttcactctctctctttcttccctttgcttgctactcttgtcgagtgcatgctttgctattacctccagcaagtgccaactcaacaacctcaacgcgttggaacccgaccaccgcgttgagtccgaaggtggtcttattgaaacatggaactctcaacaccctgagctgcaatgcgccggtgtcactgtttccaaacgcaccctcaaccgcaacggcctccacttgccatcttactcaccttatccccaaatgatcattgtcgttcaaggtgcgtaatattagtaagaagtatttatcagcttaacgtgataacaatatagtaatatgaaatatttattaaatttttataattaatctctgctagaaaatttgattaatcattttagtagaatttgttttctcaactaggtttttaaaacacca

SEQ ID NO: 5568 - DNA, 646 bp, Artificial; identical to SEQ ID NO: 5191
  Mutations within GlyA3B4 introduced by GmGlyA3B4_T03TALE nuclease

SEQ ID NO: 5569 - DNA, 661 bp, Artificial; identical to SEQ ID NO: 5046
  Mutations within GlyA3B4 introduced by GmGlyA3B4_T03TALE nuclease

SEQ ID NO: 5570 - DNA, 662 bp, Artificial; identical to SEQ ID NO: 5534
  Mutations within GlyA3B4 introduced by GmGlyA3B4_T03TALE nuclease

SEQ ID NO: 5571 - DNA, 641 bp, Artificial
  Mutations within GlyA3B4 introduced by GmGlyA3B4_T03TALE nuclease
gttcatgtacggttgcagatataaacgaagcatagcttatgtatgaggtgtaacaaaattggaaacaatagccatgcaaggtgaagaatgtcaccaactcagaaacccttcttcattgacgtgtccctcactcactctcctctcttcactataaatcgccactcttcgtgttctccacttcaccaactccttcaaacttattaacactttccttagttcaatatggggaagcccttcttcactctctctctttcttccctttgcttgctactcttgtcgagtgcatgctttgctattacctccagcaagttcaactcaacaacctcaacgcgttggaacccgaccaccgcgttgagtccgaaggtggtcttattgaaacatggaactctcaacaccctgagctgcaatgcgccggtgtcactgtttccaaacgcaccctcaaccgcaacggcctccacttgccatcttactcaccttatccccaaatgatcattgtcgttcaaggtgcgtaatattagtaagaagtatttatcagcttaacgtgataacaataatagtaatatgaaatatttattaaatttttataattaatctctgctagaaaatttgattaatcattttagtagaatttgttttctcaa

SEQ ID NO: 5572 - DNA, 575 bp, Artificial
  Mutations within GlyA3B4 introduced by GmGlyA3B4_T03TALE nuclease
gttcatgtacggttgcagatataaacgaagcatagcttatgtatgaggtgtaacaaaattggaaacaatagccatgcaaggtgaagaatgtcaccaactcagaaacccttcttcattgacgtgtccctcactcactctcctctcttcactataaatcgccactcttcgtgttctccacttcaccaactccttcaaacttattaacactttccttagttcaatatggggaagcccttcttcactctctctctttcttccctttgcttgctactcttgtcgagtgcatgctttgccaactcaacaacctcaacgcgttggaacccgaccaccgcgttgagtccgaaggtggtcttattgaaacatggaactctcaacaccctgagctgcaatgcgccggtgtcactgtttccaaacgcaccctcaaccgcaacggcctccacttgccatcttactcaccttatccccaaatgatcattgtcgttcaaggtgcgtaatattagtaagaagtatttatcagcttaacgtgataacaataatagtaatatgaaatatttattaaattttttataattaat

SEQ ID NO: 5573 - DNA, 667 bp, Artificial
  Mutations within GlyA3B4 introduced by GmGlyA3B4_T03TALE nuclease
gttcatgtacggttgcagatataaacgaagcatagcttatgtatgaggtgtaacaaaattggaaacaatagccatgcaaggtgaagaatgtcaccaactcagaaacccttcttcattgacgtgtccctcactcactctcctctcttcactataaatcgccactcttcgtgttctccacttcaccaactccttcaaacttattaacactttccttagttcaatatggggaagcccttcttcactctctctctttcttccctttgcttgctactcttgtcgagtgcatgctttgctattacctccagcaagttcgagtgccaactcaacaacctcaacgcgttggaacccgaccaccgcgttgagtccgaaggtggtcttattgaaacatggaactctcaacaccctgagctgcaatgcgccggtgtcactgtttccaaacgcaccctcaaccgcaacggcctccacttgccatcttactcaccttatccccaaatgatcattgtcgttcaaggtgcgtaatattagtaagagtatttatcagcttaacgtgataacaataatagtaatatgaaatatttattaaatttttataattaatctctgctagaaaatttgattaatcatttagtagaatttgtttttctcaactaggttttaaaacaccaca

SEQ ID NO: 5574 - DNA, 656 bp, Artificial
  Mutations within GlyA3B4 introduced by GmGlyA3B4_T03TALE nuclease
gttcatgtacggttgcagatataaacgaagcatagcttatgtatgaggtgtaacaaaattggaaacaatagccatgcaaggtgaagaatgtcaccaactcagaaaccccttcttcattgacgtgtccctcactcactctcctctcttcactataaatcgccactcttcgtgttctccacttcaccaactccttcaaacttattaacactttccttagttcaatatggggaagcccttcttcactctctctctttcttccctttgcttgctactcttgtcgagtgcatgctttgctattacctccagcaagttcgagtgccaactcaacaacctcaacgcgttggaacccgaccaccgcgttgagtccgaaggtggtcttattgaaacatggaactctcaacaccctgagctgcaatgcgccggtgtcactgtttccaaacgcaccctcaaccgcaacggcctccacttgccatcttactcaccttatccccaaatgatcattgtcgttcaaggtgcgtaatattagtaagagtatttatcagcttaacgtgataacaatatagtaatatgaaatatttattaaatttttataattaatctctgctagaaaatttgattaatcattttagtagaatttgttttctcaactaggtttt

SEQ ID NO: 5575 - DNA, 647 bp, Artificial; identical to SEQ ID NO: 5525
  Mutations within GlyA3B4 introduced by GmGlyA3B4_T03TALE nuclease

SEQ ID NO: 5576 - DNA, 516 bp, Artificial
  Mutations within GlyA3B4 introduced by GmGlyA3B4_T03TALE nuclease
gttcatgtacggttgcagatataaacgaacgcaaatgcttatgtatgaggtgtaacaaaaattggaaacaatagacccatgcaaggtgaagaatgtcaccaactcagaaacccttcttcattgagtgtcgtccctcactacactctccaatctcttcactataaatcgccactcttcgtgttctccacttcaccaactccttcaaaacttattaacactttccttagttcaatatggggaagcccttcttcactctctctctttcttccctttgcttgctactcttgtcgagtgcattgctttgctattacctccagcaagccaactcaacaacctcaacgcgttggaacccgaccaccgcgttgagtccgaaggtggtcttattgaaacatggaactctcaacaccctgagcactgcaatgcgccggtgtcactgtttccaaaacgcaccctcaaccgcaacggcctccacttgccatcttaactcaccttatccccaaatgatcattgtcgttc

SEQ ID NO: 5577 - DNA, 660 bp, Artificial; identical to SEQ ID NO: 4857
  Mutations within GlyA3B4 introduced by GmGlyA3B4_T03TALE nuclease

SEQ ID NO: 5578 - DNA, 656 bp, Artificial
  Mutations within GlyA3B4 introduced by GmGlyA3B4_T03TALE nuclease
gttcatgtacggttgcagatataaacgaagcatagcttatgtatgaggtgtaacaaaattggaaacaatagccatgcaaggtgaagaatgtcaccaactcagaaacccttcttcattgacgtgtccctcactcactctcctctcttcactataaatcgccactcttcgtgttctccacttcaccaactccttcaaacttattaacactttccttagttcaatatggggaagcccttcttcactctctctctttcttccctttgcttgctactcttgtcgagtgcatgctttgctattacctccatgccaactcaacaacctcaacgcgttggaacccgaccaccgcgttgagtccgaaggtggtcttattgaaacatggaactctcaacaccctgagctgcaatgcgccggtgtcactgtttccaaacgcaccctcaaccgcaacggcctccacttgccatcttactcaccttatccccaaatgatcattgtcgttcaaggtgcgtaatattagtaagaagtatttatcagcttaacgtgataacaataatagtaatatgaaatatttattaaatttttataattaatctctgctagaaaatttgattaatcattttagtagaatttgtttttctcaactaggttttaaaacacca

SEQ ID NO: 5579 - DNA, 648 bp, Artificial
  Mutations within GlyA3B4 introduced by GmGlyA3B4_T03TALE nuclease
gttcatgtacggttgcagatataaacgaagcatagcttatgtatgaggtgtaacaaaattggaaacaatagccatgcaaggtgaagaatgtcaccaactcagaaacccttcttcattgacgtgtccctcactcactctcctctcttcactataaatcgccactcttcgtgttctccacttcaccaactccttcaaacttattaacactttccttagttcaatatggggaagcccttcttcactctctctctttcttccctttgcttgctactcttgtcgagtgcatgctttgctattacctccagcaagtgccaactcaacaacctcaacgcgttggaacccgaccaccgcgttgagtccgaaggtggtcttattgaaacatggaactctcaacgccctgagctgcaatgcgccggtgtcactgtttccaaacgcaccctcaaccgcaacggcctccacttgccatcttactcaccttatccccaaatgatcattgtcgttcaaggtgcgtaatattagtaagaagtatttatcagcttaacgtgataacaataatagtaatatgaaatatttattaaatttttataattaatctctgctagaaaatttgattaatcattttagtagaatttgtttttctcaactagg

SEQ ID NO: 5580 - DNA, 589 bp, Artificial
  Mutations within GlyA3B4 introduced by GmGlyA3B4_T03TALE nuclease
gttcatgtacggttgcagatataaacgaagcatagcttatgtatgaggtgtaacaaaattggaaacaatagccatgcaaggtgaagaatgtcaccaactcagaaacccttcttcattgacgtgtccctcactcactctcctctcttcactataaatcgccactcttcgtgttctccacttcaccaactccttcaaacttattaacactttccttagttcaatatggggaagcccttcttcactctctctctttcttccctttgcttgctactcttgtcgagtgccaactcaacaacctcaacgcgttggaacccgaccaccgcgttgagtccgaaggtggtcttattgaaacatggaactctcaacacctgagctgcaatgcgccggtgtcactgtttccaaacgcaccctcaaccgcaacggcctccacttgccatcttactcaccttatccccaaatgatcattgtcgttcaaggtgcgtaatattagtaagaagtatttcatcagcttaacgtgataacaataatagtaatatgaaatatttattaaatttttataattaatctctgctagaaaatttgattaatc

SEQ ID NO: 5581 - DNA, 662 bp, Artificial; identical to SEQ ID NO: 4805
  Mutations within GlyA3B4 introduced by GmGlyA3B4_T03TALE nuclease

SEQ ID NO: 5582 - DNA, 618 bp, Artificial; identical to SEQ ID NO: 5404
  Mutations within GlyA3B4 introduced by GmGlyA3B4_T03TALE nuclease

SEQ ID NO: 5583 - DNA, 624 bp, Artificial
  Mutations within GlyA3B4 introduced by GmGlyA3B4_T03TALE nuclease
gttcatgtacggttgcagatataaacgaagcatagcttatgtatgaggtgtaacaaaattggaaacaatagccatgcaaggtgaagaatgtcaccaactcagaaacccttcttcattgacgtgtccctcactcactctcctctcttcactataaatcgccactcttcgtgttctccacttcaccaactccttcaaacttattaacactttccttagttcaatatggggaagcccttcttcactctctctctttcttccctttgcttgctactcttgtcgagtgcatgctttgctattacctacccgaccaccgcgttgagtccgaaggtggtcttattgaaacatggaactctcaacaccctgagctgcaatgcgccggtgtcactgtttccaaacgcaccctcaaccgcaacggcctccacttgccatcttactcaccttatccccaaatgatcattgtcgttcaaggtgcgtaatattagtaagaagtatttatcagcttaacgtgataacaataatagtaatatgaaatatttattaaattttttataattaatctctgctagaaaatttgattaatcatttttagtagaatttgtttttctcaactaggtttttaaaaca

SEQ ID NO: 5584 - DNA, 657 bp, Artificial
  Mutations within GlyA3B4 introduced by GmGlyA3B4_T03TALE nuclease
gttcatgtacggttgcagatataaacgaagcatagcttatgtatgaggtgtaacaaaattggaaacaatagccatgcaaggtgaagaatgtcaccaactcagaaacccttcttcattgacgtgtccctcactcactctcctctcttcactataaatcgccactcttcgtgttctccacttcaccaactccttcaaacttattaacactttccttagttcaatatggggaagcccttcttcactctctctctttcttccctttgcttgctactcttgtcgagtgcatgctttgctattacctccagagtgccaactcaacaacctcaacgcgttggaacccgaccaccgcgttgagtccgaaggtggtcttattgaaacatggaactctcaacaccctgagctgcaatgcgccggtgtcactgtttccaaacgcaccctcaaccgcaacggcctccacttgccatcttactcaccttatccccaaatgatcattgtcgttcaaggtgcgtaatattagtaagaagtatttatcagcttaacgtgataacaatatagtaatatgaaatatttattaaatttttataattaatctctgctagaaaatttgattaatcattttagtagaatttgttttctcaactaggttttaaaacacca

SEQ ID NO: 5585 - DNA, 666 bp, Artificial
  Mutations within GlyA3B4 introduced by GmGlyA3B4_T03TALE nuclease
gttcatgtacggttgcagatataaacgaagcatagcttatgtatgaggtgtaacaaaattggaaacaatagccatgcaaggtgaagaatgtcaccaactcagaaacccttcttcattgacgtgtccctcactcactctcctctcttcactataaatcgccactcttcgtgttctccacttcaccaactccttcaaacttattaacactttccttagttcaatatggggaagcccttcttcactctctctctttcttccctttgcttgctactcttgtcgagtgcatgctttgctattacctccagcaagttgagtgccaactcaacaacctcaacgcgttggaacccgaccaccgcgttgagtccgaaggtggtcttattgaaacatggaactctcaacaccctgagctgcaatgcgccggtgtcactgtttccaaacgcaccctcaaccgcaacggcctccacttgccatcttactcaccttatccccaaatgatcattgtcgttcaaggtgcgtaatattagtaagaagtatttatcagcttaacgtgataacaataatagtaatatgaaatatttattaaatttttataattaatctctgctagaaaatttgattaatcattttagtagaatttgtttttctcaactaggttttaaaacacca

SEQ ID NO: 5586 - DNA, 622 bp, Artificial
  Mutations within GlyA3B4 introduced by GmGlyA3B4_T03TALE nuclease
gttcatgtacggttgcagatataaacgaagcatagcttatgtatgaggtgtaacaaaattggaaacaatagccatgcaaggtgaagaatgtcaccaactcagaaacccttcttcattgacgtgtccctcactcactctcctctcttcactataaatcgccactcttcgtgttctccacttcaccaactccttcaaacttattaacactttccttagttcaatatggggaagcccttcttcactctctctctttcttccctttgcttgctactcttgtcgagtgcatgctttgctattacctccagcaagttcagtgccaactcaacaacctcaacgcgttggaacccgaccaccgcgttgagtccgaaggtggtcttattgaaacatggaactctcaacaccctgagctgcaatgcgccggtgtcactgtttccaaacgcaccctcaaccgcaacggcctccacttgccatcttactcaccttatccccaaatgatcattgtcgttcaaggtgcgtaatattagtaagaagtatttatcagcttaacgtgataacaatatagtaatatgaaatatttattaaatttttataattaatctctgctagaaaatttgattaatca

SEQ ID NO: 5587 - DNA, 553 bp, Artificial
  Mutations within GlyA3B4 introduced by GmGlyA3B4_T03TALE nuclease
gttcatgtacggttgcagatataaacgaagcatagcttatgtatgaggtgtaacaaaattggaaacaatagccatgcaaggtgaagaatgtcaccaactcagaaacccttcttcattgacgtgtccctcactcactctcctctcttcactataaatcgccactcttcgtgttctccacttcaccaactccttcaaacttattaacactttccttagttcaatatggggaagcccttcttcactctctctctttcttccctttgcttgctactcttgtcgaaacatggaactctcaacaccctgagctgcaatgcgccggtgtcactgtttccaaacgcaccctcaaccgcaacggcctccacttgccatcttactcaccttatccccaaatgatcattgtcgttcaaggtgcgtaatattagtaagaagtatttatcagcttaacgtgataacaataatagtaatatgaaatatttattaaattttttataattaatctctgctagaaaatttgattaatcatttttagtagaatttgtttttctcaactagg

SEQ ID NO: 5588 - DNA, 663 bp, Artificial
  Mutations within GlyA3B4 introduced by GmGlyA3B4_T03TALE nuclease
gttcatgtacggttgcagatataaacgaagcatagcttatgtatgaggtgtaacaaaattggaaacaatagccatgcaaggtgaagaatgtcaccaactcagaaacccttcttcattgacgtgtccctcactcactctcctctcttcactataaatcgccactcttcgtgttctccacttcaccaactccttcaaacttattaacactttccttagttcaatatggggaagcccttcttcactctctctctttcttccctttgcttgctactcttgtcgagtgcatgctttgctattacctccagcaagagtgccaactcaacaacctcaacgcgttggaacccgaccaccgcgctgagtccgaaggtggtcttattgaaacatggaactctcaacaccctgagctgcaatgcgccggtgtcactgtttccaaacgcaccctcaaccgcaacggcctccacttgccatcttactcaccttatccccaaatgatcattgtcgttcaaggtgcgtaatattagtaagaagtatttatcagcttaacgtgataacaatatagtaatatgaaatatttattaaatttttataattaatctctgctagaaaatttgattaatcattttagtagaatttgtttttctcaactaggtttttaaaacacca

SEQ ID NO: 5589 - DNA, 654 bp, Artificial
  Mutations within GlyA3B4 introduced by GmGlyA3B4_T03TALE nuclease
gttcatgtacggttgcagatataaacgaagcatagcttatgtatgaggtgtaacaaaattggaaacaatagccatgcaaggtgaagaatgtcaccaactcagaaacccttcttcattgacgtgtccctcactcactctcctctcttcactataaatcgccactcttcgtgttctccacttcaccaactccttcaaacttattaacactttccttagttcaatatggggaagcccttcttcactctctctctttcttccctttgcttgctactcttgtcgagtgcatgctttgctattacctccagcaagagtgccaactcaacaacctcaacgcgttggaacccgaccaccgcgttgagtccgaaggtggtcttattgaaacatggaactctcaacaccctgagctgcaatgcgccggtgtcactgtttccaaacgcaccctcaaccgcaacggcctccacttgccatcttactcaccttatccccaaatgatcattgtcgttcagagtcgctaatattagtaagaagtatttatcagcttaacgtgataacaatatagtaatatgaaatatttattaaatttttataattaatctctgctagaaaatttgattaatcattttagtagaatttgtttttctcaactaggttttt

SEQ ID NO: 5590 - DNA, 647 bp, Artificial; identical to SEQ ID NO: 4991
  Mutations within GlyA3B4 introduced by GmGlyA3B4_T03TALE nuclease

SEQ ID NO: 5591 - DNA, 552 bp, Artificial
  Mutations within GlyA3B4 introduced by GmGlyA3B4_T03TALE nuclease
gttcatgtacggttgcagatataaacgaagcatagcttatgtatgaggtgtaacaaaattggaaacaatagccatgcaaggtgaagaatgtcaccaactcagaaacccttcttcattgacgtgtccctcactcactctcctctcttcactataaatcgccactcttcgtgttctccacttcacctcactttcgatcgatgaccacccttcaacaacctcaacgcgttggaacccgaccaccgcgttgagtccgaaggtggtcttattgaaacatggaactctcaacaccctgagctgcaatgcgccggtgtcactgtttccaaacgcaccctcaaccgcaacggcctccacttgccatcttactcaccttatccccaaatgatcattgtcgttcaaggtgcgtaatattagtaagaagtatttatcagcttaacgtgataacaataatagtaatatgaaatatttattaaattttttataattaatctctgctagaaaatttgattaatcatttttagtagaatttgtttttctcaactaggtttttaaaca

SEQ ID NO: 5592 - DNA, 654 bp, Artificial
  Mutations within GlyA3B4 introduced by GmGlyA3B4_T03TALE nuclease
gttcatgtacggttgcagatataaacgaagcatagcttatgtatgaggtgtaacaaaattggaaacaatagccatgcaaggtgaagaatgtcaccaactcagaaacccttcttcattgacgtgtccctcactcactctcctctcttcactataaatcgccactcttcgtgttctccacttcaccaactccttcaaacttattaacactttccttagttcaatatggggaagcccttcttcactctctctctttcttccctttgcttgctactcttgtcgagtgcatgctttgctattacctccagcaaactcaacaacctcaacgcgttggaacccgaccaccgcgttgagtccgaaggtggtcttattgaaacatggaactctcaacaccctgagctgcaatgcgccggtgtcactgtttccaaacgcaccctcaaccgcaacggcctccacttgccatcttactcaccttatccccaaatgatcattgtcgttcaaggtgcgtaatattagtaagaagtatttatcagcttaacgtgataacaatatagtaatatgaaatatttattaaatttttataattaatctctgctagaaaatttgattaatcattttagtagaatttgtttttctcaactaggtttttaaacacca

SEQ ID NO: 5593 - DNA, 657 bp, Artificial
  Mutations within GlyA3B4 introduced by GmGlyA3B4_T03TALE nuclease
gttcatgtacggttgcagatataaacgaagcatagcttatgtatgaggtgtaacaaaattggaaacaatagccatgcaaggtgaagaatgtcaccaactcagaaacccttcttcattgacgtgtccctcactcactctcctctcttcactataaatcgccactcttcgtgttctccacttcaccaactccttcaaacttattaacactttccttagttcaatatggggaagcccttcttcactctctctctttcttccctttgcttgctactcttgtcgagtgcatgctttgctattacctccagcaaggtgccaactcaacaacctcaacgcgttggaacccgaccaccgcgttgagtccgaaggtggtcttattgaaacatggaactctcaacaccctgagctgcaatgcgccggtgtcactgtttccaaacgcaccctcaaccgcaacggcctccacttgccatcttactcaccttatccccaaatgatcattgtcgttcaaggtgcgtaatattagtaagaagttatttatcagtcattaacgtgataacaataatagtaatatgaaatatttattaaatttttataattaatctctgctagaaaatttgattaatcatttttagtagaatttgtttttctcaactaggtttt

SEQ ID NO: 5594 - DNA, 569 bp, Artificial
  Mutations within GlyA3B4 introduced by GmGlyA3B4_T03TALE nuclease
gttcatgtacggttgcagatataaacgaagcatagcttatgtatgaggtgtaacaaaattggaaacaatagccatgcaaggtgaagaatgtcaccaactcagaaacccttcttcattgacgtgtccctcactcactctcctctcttcactataaatcgccactcttcgtgttctccacttcaccaactccttcaaacttattaacactttccttagttcaatatggggaagcccttcttcactctctctctttcttccctttccaccgcgttgagtccgaaggtggtcttattgaaacatggaactctcaacaccctgagctgcaatgcgccggtgtcactgtttccaaacgcaccctcaaccgcaacggcctccacttgccatcttactcaccttatccccaaatgatcattgtcgttcaaggtgcgtaatattagtaagaagtatttatcagcttaacgtgataacaataatagtaatatgaaatattttattaaattttttataattaatctctgctagaaaatttgattaatcatttttagtagaatttgtttttctcaactagg

SEQ ID NO: 5595 - DNA, 621 bp, Artificial; identical to SEQ ID NO: 5319
  Mutations within GlyA3B4 introduced by GmGlyA3B4_T03TALE nuclease

SEQ ID NO: 5596 - DNA, 652 bp, Artificial
  Mutations within GlyA3B4 introduced by GmGlyA3B4_T03TALE nuclease
gttcatgtacggttgcagatataaacgaagcatagcttatgtatgaggtgtaacaaaattggaaacaatagccatgcaaggtgaagaatgtcaccaactcagaaaccccttcttcattgacgtgtccctcactcactctcctctcttcactataaatcgccactcttcgtgttctccacttcaccaactccttcaaacttattaacactttccttagttcaatatggggaagcccttcttcactctctctctttcttccctttgcttgctactcttgtcgagtgcatgctttgctattacctccagcaacctcaacgcgttggaacccgaccaccgcgttgagtccgaaggtggtcttattgaaacatggaactctcaacaccctgagctgcaatgcgccggtgtcactgtttccaaacgcaccctcaaccgcaacggcctccacttgccatcttactcaccttatcccccaaatgatcattgtcgttcaaggtgcgtaatattagtaagaagtatttatcagcttaacgtgataacaataatagtaatatgaaatatttattaaattttttataattaatctctgctagaaaatttgattaatcatttttagtagaatttgttttttctcaactaggttttaaacaccaca

SEQ ID NO: 5597 - DNA, 666 bp, Artificial; identical to SEQ ID NO: 5585
  Mutations within GlyA3B4 introduced by GmGlyA3B4_T03TALE nuclease

SEQ ID NO: 5598 - DNA, 639 bp, Artificial
  Mutations within GlyA3B4 introduced by GmGlyA3B4_T03TALE nuclease
gttcatgtacggttgcagatataaacgaagcatagcttatgtatgaggtgtaacaaaattggaaacaatagccatgcaaggtgaagaatgtcaccaactcagaaacccttcttcattgacgtgtccctcactcactctcctctcttcactataaatcgccactcttcgtgttctccacttcaccaactccttcaaacttattaacactttccttagttcaatatggggaagcccttcttcactctctctctttcttccctttgcttgctactcttgtcgagtgcatgctttgctattacctccagcaagttcaagtgccaactcaacaacctcaacgcgttggaacccgaccaccgcgttgagtccgaaggtggtcttattgaaacatggaactctcaacaccctgagctgcaatgcgccggtgtcactgtttccaaacgcaccctcaaccgcaacggcctccacttgccatcttactcaccttatccccaaatgatcattgtcgttcaaggtgcgtaatattagtaagaagtatttatcagcttaacgtgataacaataatagtaatatgaaatatttattaaatttttataattaatctctgctagaaaatttgattaatcattttagtagaatttg

SEQ ID NO: 5599 - DNA, 633 bp, Artificial; identical to SEQ ID NO: 5539
  Mutations within GlyA3B4 introduced by GmGlyA3B4_T03TALE nuclease

SEQ ID NO: 5600 - DNA, 656 bp, Artificial
  Mutations within GlyA3B4 introduced by GmGlyA3B4_T03TALE nuclease
gttcatgtacggttgcagatataaacgaagcatagcttatgtatgaggtgtaacaaaattggaaacaatagccatgcaaggtgaagaatgtcaccaactcagaaacccttcttcattgacgtgtccctcactcactctcctctcttcactataaatcgccactcttcgtgttctccacttcaccaactccttcaaacttattaacactttccttagttcaatatggggaagcccttcttcactctctctctttcttccctttgcttgctactcttgtcgagtgcatgctttgctattacctccagcaatgccaactcaacaacctcaacgcgttggaacccgaccaccgcgttgagtccgaaggtggtcttattgaaacatggaactctcaacaccctgagctgcaatgcgccggtgtcactgtttccaaacgcaccctcaaccgcaacggcctccacttgccatcttactcaccttatccccaaatgatcattgtcgttcaaggtgcgtaatattagtaagaagtatttatcagcttaacgtgataacaataatagtaatatgaaatatttattaaatttttataattaatctctgctagaaaatttgattaatcattttagtagaatttgtttttctcaactaggtttttaaaa

SEQ ID NO: 5601 - DNA, 663 bp, Artificial
  Mutations within GlyA3B4 introduced by GmGlyA3B4_T03TALE nuclease
gttcatgtacggttgcagatataaacgaagcatagcttatgtatgaggtgtaacaaaattggaaacaatagccatgcaaggtgaagaatgtcaccaactcagaaacccttcttcattgacgtgtccctcactcactctcctctcttcactataaatcgccactcttcgtgttctccacttcaccaactccttcaaacttattaacactttccttagttcaatatggggaagcccttcttcactctctctctttcttccctttgcttgctactcttgtcgagtgcatgctttgctattacctccagcaagttcaacgccaactcaacaacctcaacgcgttggaacccgaccaccgcgttgagtccgaaggtggtcttattgaaacatggaactctcaacaccctgagctgcaatgcgccggtgtcactgtttccaaacgcaccctcaaccgcaacggcctccacttgccatcttactcaccttatccccaaatgatcattgtcgttcaaggtgcgtaatattagtaagagtatttatcagcttaacgtgataacaatatagtaatatgaaatatttattaaatttttataattaatctctgctagaaaatttgattaatcattttagtagaatttgtttttctcaactaggttttaaacacca

SEQ ID NO: 5602 - DNA, 632 bp, Artificial; identical to SEQ ID NO: 4835
  Mutations within GlyA3B4 introduced by GmGlyA3B4_T03TALE nuclease

SEQ ID NO: 5603 - DNA, 649 bp, Artificial
  Mutations within GlyA3B4 introduced by GmGlyA3B4_T03TALE nuclease
gttcatgtacggttgcagatataaacgaagcatagcttatgtatgaggtgtaacaaaattggaaacaatagccatgcaaggtgaagaatgtcaccaactcagaaacccttcttcattgacgtgtccctcactcactctcctctcttcactataaatcgccactcttcgtgttctccacttcaccaactccttcaaacttattaacactttccttagttcaatatggggaagcccttcttcactctctctctttcttccctttgcttgctactcttgtcgagtgcatgctttgctattacctccagcaagccaactcaacaacctcaacgcgttggaacccgaccaccgcgttgagtccgaaggtggtcttattgaaacatggaactctcaacaccctgagctgcaatgcgccggtgtcactgtttccaaacgcaccctcaaccgcaacggcctccacttgccatcttactcaccttatccccaaatgatcattgtcgttcaaggtgcgtaatattagtaagaagtatttatcagcttaacgtgataacaataatagtaatatgaaatatttattaaatttttataattaatctctgctagaaaatttgattaatcattttagtagaatttgttttctcaactaggtttt

SEQ ID NO: 5604 - DNA, 426 bp, Artificial; identical to SEQ ID NO: 4777
  Mutations within GlyA3B4 introduced by GmGlyA3B4_T03TALE nuclease

SEQ ID NO: 5605 - DNA, 637 bp, Artificial; identical to SEQ ID NO: 5203
  Mutations within GlyA3B4 introduced by GmGlyA3B4_T03TALE nuclease

SEQ ID NO: 5606 - DNA, 614 bp, Artificial
  Mutations within GlyA3B4 introduced by GmGlyA3B4_T03TALE nuclease
gttcatgtacggttgcagatataaacgaagcatagcttatgtatgaggtgtaacaaaattggaaacaatagccatgcaaggtgaagaatgtcaccaactcagaaacccttcttcattgacgtgtccctcactcactctcctctcttcactataaatcgccactcttcgtgttctccacttcaccaactccttcaaacttattaacactttccttagttcaatatggggaagcccttcttcactctctctctttcttccctttgcttgctactcttgtcgagtgcatgctttgctattacctccagcaagtgccaactcaacaacctcaacgcgttggaacccgaccaccgcgttgagtccgaaggtggtcttattgaaacatggaactctcaacaccctgagctgcaatgcgccggtgtcactgtttccaaaacgcaccctcaaccgcaacggcctccacttgccatcttactcaccttatccccaaatgatcattgtcgttcaaggtgcgtaatattagtaagaagtatttatcagcttaacgtgataacaataatagtaatatgaaatatttattaaatttttataattaatctctgctagaaaatttgatt

SEQ ID NO: 5607 - DNA, 663 bp, Artificial; identical to SEQ ID NO: 4967
  Mutations within GlyA3B4 introduced by GmGlyA3B4_T03TALE nuclease

SEQ ID NO: 5608 - DNA, 669 bp, Artificial
  Mutations within GlyA3B4 introduced by GmGlyA3B4_T03TALE nuclease
gttcatgtacggttgcagatataaacgaagcatagcttatgtatgaggtgtaacaaaattggaaacaatagccatgcaaggtgaagaatgtcaccaactcagaaaccccttcttcattgacgtgtccctcactcactctcctctcttcactataaatcgccactcttcgtgttctccacttcaccaactccttcaaacttattaacactttccttagttcaatatggggaagcccttcttcactctctctctttcttccctttgcttgctactcttgtcgagtgcatgctttgctattacctccagcaagttcaaagtgccaactcaacaacctcaacgcgttggaacccgaccaccgcgttgagtccgaaggtggtcttattgaaacatggaactctcaacaccctgagctgcaatgcgccggtgtcactgtttccaaacgcaccctcaaccgcaacggcctccacttgccatcttactcaccttatccccaaatgatcattgtcgttcaaggtgcgtaatattagtaagaagtatttatcagcttaacgtgataacaatatagtaatatgaaatatttattaaatttttataattaatctctgctagaaaatttgattaatcattttagtagaatttgttttctcaatctaggttttaaaacaccta

SEQ ID NO: 5609 - DNA, 638 bp, Artificial
  Mutations within GlyA3B4 introduced by GmGlyA3B4_T03TALE nuclease
gttcatgtacggttgcagatataaacgaagcatagcttatgtatgaggtgtaacaaaaattggaaacaatagccatgcaaggtgaagaatgtcaccaactcagaaacccttcttcattgacgtgtccctcactcactctcctctcttcactataaatcgccactcttcgtgttctccacttcaccaactccttcaaacttattaacactttccttagttcaatatggggaagcccttcttcactctctctctttcttccctttgcttgctactcttgtcgagtgcatgctttgctattacctccagcaagttgagtgccaactcaacaacctcaacgcgttggaacccgaccaccgcgttgagtccgaaggtggtcttattgaaacatggaactctcaacaccctgagctgcaatgcgccggtgtcactgtttccaaacgcaccctcaaccgcaacggcctccacttgccatcttactcaccttatccccaaatgatcattgtcgttcaaggtgcgtaatattagtaagaagtatttatcagcttaacgtgataacaatatagtaatatgaaatatttattaaatttttataattaatctctgctagaaaatttgattaatcattttagtagaatttg

SEQ ID NO: 5610 - DNA, 646 bp, Artificial
  Mutations within GlyA3B4 introduced by GmGlyA3B4_T03TALE nuclease
gttcatgtacggttgcagatataaacgaagcatagcttatgtatgaggtgtaacaaaattggaaacaatagccatgcaaggtgaagaatgtcaccaactcagaaacccttcttcattgacgtgtccctcactcactctcctctcttcactataaatcgccactcttcgtgttctccacttcaccaactccttcaaacttattaacactttccttagttcaatatggggaagcccttcttcactctctctctttcttccctttgcttgctactcttgtcgagtgcatgctttgctattacctccagcaagttaaggccaactcaacaacctcaacgcgttggaacccgaccaccgcgttgagtccgaaggtggtcttattgaaacatggaactctcaacaccctgagctgcaatgcgccggtgtcactgtttccaaacgcaccctcaaccgcaacggcctccacttgccatcttactcaccttatccccaaatgatcattgtcgttcaaggtgcgtaatattagtaagaagtatttatcagcttaacgtgataacaataatagtaatatgaaatatttattaaatttttataattaatctctgctagaaaatttgattaatcattttagtagaatttgttttctcaa

SEQ ID NO: 5611 - DNA, 663 bp, Artificial; identical to SEQ ID NO: 4975
  Mutations within GlyA3B4 introduced by GmGlyA3B4_T03TALE nuclease

SEQ ID NO: 5612 - DNA, 637 bp, Artificial; identical to SEQ ID NO: 5203
  Mutations within GlyA3B4 introduced by GmGlyA3B4_T03TALE nuclease

SEQ ID NO: 5613 - DNA, 567 bp, Artificial
  Mutations within GlyA3B4 introduced by GmGlyA3B4_T03TALE nuclease
gttcatgtacggttgcagatataaacgaagcatagcttatgtatgaggtgtaacaaaattggaaacaatagccatgcaaggtgaagaatgtcaccaactcagaaacccttcttcattgacgtgtccctcactcactctcctctcttcactataaatcgccactcttcgtgttctccacttcaccaactccttcaaacttattaacactttccttagttcaatatggggaagcccttcttcactctctctctttcaacaacctcaacgcgttggaacccgaccaccgcgttgagtccgaaggtggtcttattgaaacatggaactctcaacaccctgagctgcaatgcgccggtgtcactgtttccaaacgcaccctcaaccgcaacggcctccacttgccatcttactcaccttatccccaaatgatcattgtcgttcaaggtgcgtaatattagtaagaagtatttatcagcttaacgtgataacaataatagtaatatgaaatatttattaaattttttataattaatctctgctagaaaatttgattaatcatttttagtagaa

SEQ ID NO: 5614 - DNA, 545 bp, Artificial; identical to SEQ ID NO: 5377
  Mutations within GlyA3B4 introduced by GmGlyA3B4_T03TALE nuclease

SEQ ID NO: 5615 - DNA, 647 bp, Artificial
  Mutations within GlyA3B4 introduced by GmGlyA3B4_T03TALE nuclease
gttcatgtacggttgcagatataaacgaagcatagcttatgtatgaggtgtaacaaaattggaaacaatagccatgcaaggtgaagaatgtcaccaactcagaaacccttcttcattgacgtgtccctcactcactctcctctcttcactataaatcgccactcttcgtgttctccacttcaccaactccttcaaacttattaacactttccttagttcaatatggggaagcccttcttcactctctctctttcttccctttgcttgctactcttgtcgagtgcatgctttgctattacctccagcaagttagtgccaactcaacaacctcaacgcgttggaacccgaccaccgcgttgagtccgaaggtggtcttattgaaacatggaactctcaacaccctgagctgcaatgcgccggtgtcactgtttccaaacgcaccctcaaccgcaacggcctccacttgccatcttactcaccttatccccaaatgatcattgtcgttcaaggtgcgtaatattagtaagaagtatttatcagcttaacgtgataacaatatagtaatatgaaatatttattaaatttttataatttaatctctgctagaaaatttgattaatcattttagtagaatttgtttttctcaa

SEQ ID NO: 5616 - DNA, 659 bp, Artificial; identical to SEQ ID NO: 4859
  Mutations within GlyA3B4 introduced by GmGlyA3B4_T03TALE nuclease

SEQ ID NO: 5617 - DNA, 491 bp, Artificial
  Mutations within GlyA3B4 introduced by GmGlyA3B4_T03TALE nuclease
gttcatgtacggttgcagatataaacgaagcatagcttatgtatgaggtgtaacaaaattggaaacaatagccatgcaaggtgaagaatgtcaccaactcagaaacccttcttcattgacgtgtccctcactcactctcctctcttcactataaatcgccactcttcgtgttctccacttcaccaactccttcaaacttattaacactttccttagttcaatatggggaagcccttcttcactctctctctttcttccctttgcttgctactcttgtcgagtgcatgctttgctattacctccagcaagttcaccttatccccaaatgatcattgtcgttcaaggtgcgtaatattagtaagagtatttatcagcttaacgtgataacaataatagtaatatgaaatattattaaatttttataattaatctctgctagaaaatttgattaatcatttttagtagaatttgtttttctcaactaggttttt

SEQ ID NO: 5618 - DNA, 642 bp, Artificial
  Mutations within GlyA3B4 introduced by GmGlyA3B4_T03TALE nuclease
gttcatgtacggttgcagatataaacgaagcatagcttatgtatgaggtgtaacaaaaattggaaacaatagccatgcaaggtgaagaatgtcaccaactcagaaacccttcttcattgacgtgtccctcactcactctcctctcttcactataaatcgccactcttcgtgttctccacttcaccaactccttcaaacttattaacactttccttagttcaatatggggaagcccttcttcactctctctctttcttccctttgcttgctactcttgtcgagtgcatgctttgctattacctccagcaagtgccaactcaacaacctcaacgcgttggaacccgaccaccgcgttgagtccgaaggtggtcttattgaacatggaactctcaacaccctgagctgcaatgcgccggtgtcactgtttccaaacgcaccctcaaccgcaacggcctccacttgccatcttactcaccttatccccaaatgatcattgtcgttcaaggtgcgtaatattagtaagaagtatttatcagcttaacgtgataacaatatagtaatatgaaatatttattaaatttttataattaatctctgctagaaaatttgattaatcattttagtagaatttgtttttctcac

SEQ ID NO: 5619 - DNA, 620 bp, Artificial
  Mutations within GlyA3B4 introduced by GmGlyA3B4_T03TALE nuclease
gttcatgtacggttgcagatataaacgaagcatagcttatgtatgaggtgtaacaaaattggaaacaatagccatgcaaggtgaagaatgtcaccaactcagaaacccttcttcattgacgtgtccctcactcactctcctctcttcactataaatcgccactcttcgtgttctccacttcaccaactccttcaaacttattaacactttccttagttcaatatggggaagcccttcttcactctctctctttcttccctttgcttgctactcttgtcgagtgccaactcaacaacctcaacgcgttggaacccgaccaccgcgttgagtcccgaaggtggtcttattgaaacatggaactctcaacaccctgagctgcaatgcgccggtgtcactgtttccaaacgcaccctcaaccgcaacggcctccacttgccatcttactcaccttatccccaaatgatcattgtcgttcaaggtgcgtaatattagtaagaagtatttatcagcttaacgtgataacaataatagtaatatgaaatatttattaattttttataattaatctctgctagaaaatttgattaatcatttttagtagaatttgtttttctcaacta

SEQ ID NO: 5620 - DNA, 638 bp, Artificial; identical to SEQ ID NO: 5184
  Mutations within GlyA3B4 introduced by GmGlyA3B4_T03TALE nuclease
  misc_feature (532): n is a or c or t or g

SEQ ID NO: 5621 - DNA, 643 bp, Artificial
  Mutations within GlyA3B4 introduced by GmGlyA3B4_T03TALE nuclease
gttcatgtacggttgcagatataaacgaagcatagcttatgtatgaggtgtaacaaaattggaaacaatagccatgcaaggtgaagaatgtcaccaactcagaaacccttcttcattgacgtgtccctcactcactctcctctcttcactataaatcgccactcttcgtgttctccacttcaccaactccttcaaacttattaacactttccttagttcaatatggggaagcccttcttcactctctctctttcttccctttgcttgctactcttgtcgagtgcatgctttgctattacctccagcaagttcaacaacctcaacgcgttggaacccgaccaccgcgttgagtccgaaggtggtcttattgaaacatggaactctcacacctgagctgcaatgcgccggtgtcactgtttccaaacgcaccctcaaccgcaacggcctccacttgccatcttactcaccttatccccaaatgatcattgtcgttcaaggtgcgtaatattagtaagaagtatttatcagcttaacgtgataacaataatagtaatatgaaatatttattaaattttttataattaatctctgctagaaaatttgattaatcatttttagtagaatttgttttttctcaactagg

SEQ ID NO: 5622 - DNA, 621 bp, Artificial
  Mutations within GlyA3B4 introduced by GmGlyA3B4_T03TALE nuclease
gttcatgtacggttgcagatataaacgaagcatagcttatgtatgaggtgtaacaaaattggaaacaatagccatgcaaggtgaagaatgtcaccaactcagaaacccttcttcattgacgtgtccctcactcactctcctctcttcactataaatcgccactcttcgtgttctccacttcaccaactccttcaaacttattaacactttccttagttcaatatggggaagcccttcttcactctctctctttcttccctttgcttgctactcttgtcgagtgcatgctttgctattacctccagcaagtcagtgccaactcaacaacctcaacgcgttggaacccgaccaccgcgttgagtccgaaggtggtcttattgaaacatggaactctcaacaccctgagctgcaatgcgccggtgtcactgtttccaaacgcaccctcaaccgcaacggcctccacttgccatcttactcaccttatccccaaatgatcattgtcgttcaaggtgcgtaatattagtaagaagtatttatcagcttaacgtgataacaatatagtaatatgaaatatttattaaatttttataattaatctctgctagaaaatttgattaatca

SEQ ID NO: 5623 - DNA, 632 bp, Artificial
  Mutations within GlyA3B4 introduced by GmGlyA3B4_T03TALE nuclease
gttcatgtacggttgcagatataaacgaagcatagcttatgtatgaggtgtaacaaaattggaaacaatagccatgcaaggtgaagaatgtcaccaactcagaaacccttcttcattgacgtgtccctcactcactctcctctcttcactataaatcgccactcttcgtgttctccacttcaccaactccttcaaacttattaacactttccttagttcaatatggggaagcccttcttcactctctctctttcttccctttgcttgctactcttgtcgagtgcatgctttgctattacctccagcaagttcaactcaacaacctcaacgcgttggaacccgaccaccgcgttgagtccgaaggtggtcttattgaaacatggaactctcaacaccctgagctgcaatgcgccggtgtcactgtttccaaacgcaccctcaaccgcaacggcctccacttgccatcttactcaccttatccccaaatgatcattgtcgttcaaggtgcgtaatattagtaagaagtatttatcagcttaacgtgataacaataatagtaatatgaaatatttattaaatttttataattaatctctgctagaaaatttgattaatcattttagtagaatttg

SEQ ID NO: 5624 - DNA, 648 bp, Artificial; identical to SEQ ID NO: 5336
  Mutations within GlyA3B4 introduced by GmGlyA3B4_T03TALE nuclease

SEQ ID NO: 5625 - DNA, 657 bp, Artificial
  Mutations within GlyA3B4 introduced by GmGlyA3B4_T03TALE nuclease
  misc_feature (532): n is a or c or t or g
gttcatgtacggttgcagatataaacgaagcatagcttatgtatgaggtgtaacaaaattggaaacaatagccatgcaaggtgaagaatgtcaccaactcagaaacccttcttcattgacgtgtccctcactcactctcctctcttcactataaatcgccactcttcgtgttctccacttcaccaactccttcaaacttattaacactttccttagttcaatatggggaagcccttcttcactctctctctttcttccctttgcttgctactcttgtcgagtgcatgctttgctattacctccagcaagttcgagtgccaactcaacaacctcaacgcgttggaacccgaccaccgcgttgagtccgaaggtggtcttattgaaacatggaactctcaacaccctgagctgcaatgcgccggtgtcactgtttccaaacgcaccctcaaccgcaacggcctccacttgccatcttactcaccttatccccaaatgatcattgtcgttcaaggtgcgtaatattagtaagagnatttatcagcttaacgtgataacaatatagtaatatgaaatatttattaaatttttataattaatctctgctagaaaatttgattaatcattttagtagaatttgtttttctcaactaggttttt

SEQ ID NO: 5626 - DNA, 564 bp, Artificial
  Mutations within GlyA3B4 introduced by GmGlyA3B4_T03TALE nuclease
  misc_feature (537): n is a or c or t or g
gttcatgtacggttgcagatataaacgaagcatagcttatgtatgaggtgtaacaaaattggaaacaatagccatgcaaggtgaagaatgtcaccaactcagaaacccttcttcattgacgtgtccctcactcactctcctctcttcactataaatcgccactcttcgtgttctccacttcaccaactccttcaaacttattaacactttccttagttcaatatggggaagcccttcttcactctctctctttcttccctttgcttgctactcttgtcgagtgcatgctttgctattacctccagcaagttcgagtgccaactcaacaacctcaacgcgttggaacccgaccaccgcgttgagtccgaaggtggtcttattgaaacatggaactctcaacaccctgagctgcaatgcgccggtgtcactgtttccaaacgcaccctcaaccgcaacggcctccacttgccatcttactcaccttatcccccaaaatgatcattgtcgttcaaagggtgcgtaatattagtaagaagnattttatcagcttaacgtgataacaat

SEQ ID NO: 5627 - DNA, 624 bp, Artificial
  Mutations within GlyA3B4 introduced by GmGlyA3B4_T03TALE nuclease
gttcatgtacggttgcagatataaacgaagcatagcttatgtatgaggtgtaacaaaattggaaacaatagccatgcaaggtgaagaatgtcaccaactcagaaacccttcttcattgacgtgtccctcactcactctcctctcttcactataaatcgccactcttcgtgttctccacttcaccaactccttcaaacttattaacactttccttagttcaatatggggaagcccttcttcactctctctctttcttccctttgcttgctactcttgtcgagtgcatgctttgctattacctccagcaagttcaagtgccaactcaacaacctcaacgcgttggaacccgaccaccgcgttgagtccgaaggtggtcttattgaaacatggaactctcaacaccctgagctgcaatgcgccggtgtcactgtttccaaacgcaccctcaaccgcaacggcctccacttgccatcttactcaccttatccccaaatgatcattgtcgttcaaggtgcgtaatattagtaagaagtatttatcagcttaacgtgataacaataatagtaatatgaaatatttattaaatttttataattaatctctgctagaaaatttgattaatca

SEQ ID NO: 5628 - DNA, 652 bp, Artificial
  Mutations within GlyA3B4 introduced by GmGlyA3B4_T03TALE nuclease
gttcatgtacggttgcagatataaacgaagcatagcttatgtatgaggtgtaacaaaattggaaacaatagccatgcaaggtgaagaatgtcaccaactcagaaacccttcttcattgacgtgtccctcactcactctcctctcttcactataaatcgccactcttcgtgttctccacttcaccaactccttcaaacttattaacactttccttagttcaatatggggaagcccttcttcactctctctctttcttccctttgcttgctactcttgtcgagtgcatgctttgctattacctccagcaagttcaatcaacgcgttggaacccgaccaccgcgttgagtccgaaggtggtcttattgaaacatggaactctcaacaccctgagctgcaatgcgccggtgtcactgtttccaaacgcaccctcaaccgcaacggcctccacttgccatcttactcaccttatccccaaatgatcattgtcgttcaaggtgcgtaatattagtaagaagtatttatcagcttaacgtgataacaataatagtaatatgaaatatttattaaattttttataattaatctctgctagaaaatttgattaatcatttttagtagaatttgttttttctcaactaggttttaaacacca

SEQ ID NO: 5629 - DNA, 666 bp, Artificial
  Mutations within GlyA3B4 introduced by GmGlyA3B4_T03TALE nuclease
gttcatgtacggttgcagatataaacgaagcatagcttatgtatgaggtgtaacaaaattggaaacaatagccatgcaaggtgaagaatgtcaccaactcagaaacccttcttcattgacgtgtccctcactcactctcctctcttcactataaatcgccactcttcgtgttctccacttcaccaactccttcaaacttattaacactttccttagttcaatatggggaagcccttcttcactctctctctttcttccctttgcttgctactcttgtcgagtgcatgctttgctattacctccagcaagttcaagtgccactcaacaacctcaacgcgttggaacccgaccaccgcgttgagtccgaaggtggtcttattgaaacatggaactctcaacaccctgagctgcaatgcgccggtgtcactgtttccaaacgcaccctcaaccgcaacggcctccacttgccatcttactcaccttatccccaaatgatcattgtcgttcaaggtgcgtaatattagtaagaagtatttatcagcttaacgtgataacaatatagtaatatgaaatatttattaaatttttataattaatctctgctagaaaatttgattaatcattttagtagaatttgtttttctcaactaggtttttaaaacacca

SEQ ID NO: 5630 - DNA, 552 bp, Artificial; identical to SEQ ID NO: 4807
  Mutations within GlyA3B4 introduced by GmGlyA3B4_T03TALE nuclease

SEQ ID NO: 5631 - DNA, 636 bp, Artificial
  Mutations within GlyA3B4 introduced by GmGlyA3B4_T03TALE nuclease
gttcatgtacggttgcagatataaacgaagcatagcttatgtatgaggtgtaacaaaattggaaacaatagccatgcaaggtgaagaatgtcaccaactcagaaacccttcttcattgacgtgtccctcactcactctcctctcttcactataaatcgccactcttcgtgttctccacttcaccaactccttcaaacttattaacactttccttagttcaatatggggaagcccttcttcactctctctctttcttccctttgcttgctactcttgtcgagtgcatgctttgctattacctccagcaagtgagtgccaactcaacaacctcaacgcgttggaacccgaccaccgcgttgagtccgaaggtggtcttattgaaacatggaactctcaacaccctgagctgcaatgcgccggtgtcactgtttccaaacgcaccctcaaccgcaacggcctccacttgccatcttactcaccttatccccaaatgatcattgtcgttcaaggtgcgtaatattagtaagaagtatttatcagcttaacgtgataacaatatagtaatatgaaatatttattaaatttttataattaatctctgctagaaaatttgattaatcattttagtagaatttg

SEQ ID NO: 5632 - DNA, 645 bp, Artificial; identical to SEQ ID NO: 5301
  Mutations within GlyA3B4 introduced by GmGlyA3B4_T03TALE nuclease

SEQ ID NO: 5633 - DNA, 668 bp, Artificial
  Mutations within GlyA3B4 introduced by GmGlyA3B4_T03TALE nuclease
gttcatgtacggttgcagatataaacgaagcatagcttatgtatgaggtgtaacaaaattggaaacaatagccatgcaaggtgaagaatgtcaccaactcagaaacccttcttcattgacgtgtccctcactcactctcctctcttcactataaatcgccactcttcgtgttctccacttcaccaactccttcaaacttattaacactttccttagttcaatatggggaagcccttcttcactctctctctttcttccctttgcttgctactcttgtcgagtgcatgctttgctattacctccagcaagtcagcgatgtcacgctacatcaacctcaaacctcagcgcgttggaacccgaccaccgcgttgagtccgaaggtggtcttattgaaacatggaactctcaacaccctgagctgcaatgcgccggtgtcactgtttccaaacgcaccctcaaccgcaacggcctccacttgccatcttactcaccttatccccaaatgatcattgtcgttcaaggtgcgtaatattagtaagaagtatttatcagcttaacgtgataacaataatagtaatatgaaatatttattaaatttttataattaatctctgctagaaaatttgattaatcattttagtagaatttgtttttctcaactaggtttt

SEQ ID NO: 5634 - DNA, 659 bp, Artificial; identical to SEQ ID NO: 4859
  Mutations within GlyA3B4 introduced by GmGlyA3B4_T03TALE nuclease

SEQ ID NO: 5635 - DNA, 657 bp, Artificial
  Mutations within GlyA3B4 introduced by GmGlyA3B4_T03TALE nuclease
gttcatgtacggttgcagatataaacgaagcatagcttatgtatgaggtgtaacaaaattggaaacaatagccatgcaaggtgaagaatgtcaccaactcagaaacccttcttcattgacgtgtccctcactcactctcctctcttcactataaatcgccactcttcgtgttctccacttcaccaactccttcaaacttattaacactttccttagttcaatatggggaagcccttcttcactctctctctttcttccctttgcttgctactcttgtcgagtgcatgctttgctattacctccagcaagttcgagtgccaactcaacaacctcaacgcgttggaacccgaccaccgcgttgagtccgaaggtggtcttattgaaacatggaactctcaacaccctgagctgcaatgcgccggtgtcactgtttccaaacgcaccctcaaccgcaacggcctccacttgccatcttactcaccttatccccaaatgatcattgtcgttcaaggtgcgtaatattagtaagagtatttatcagcttaacgtgataacaatatagtaatatgaaatatttattaaatttttataattaatctctgctagaaaatttgattaatcattttagtagaatttgtttttctcaactaggttttt

SEQ ID NO: 5636 - DNA, 640 bp, Artificial
  Mutations within GlyA3B4 introduced by GmGlyA3B4_T03TALE nuclease
gttcatgtacggttgcagatataaacgaagcatagcttatgtatgaggtgtaacaaaattggaaacaatagccatgcaaggtgaagaatgtcaccaactcagaaacccttcttcattgacgtgtccctcactcactctcctctcttcactataaatcgccactcttcgtgttctccacttcaccaactccttcaaacttattaacactttccttagttcaatatggggaagcccttcttcactctctctctttcttccctttgcttgctactcttgtcgagtgcatgctttgctattacctccagcaacctcaacgcgttggaacccgaccaccgcgttgagtccgaaggtggtcttattgaaacatggaactctcaacaccctgagctgcaatgcgccggtgtcactgtttccaaacgcaccctcaaccgcaacggcctccacttgccatcttactcaccttatccccaaatgatcattgtcgttcaaggtgcgtaatattagtaagaagtatttatcagcttaacgtgataacaataatagtaatatgaaatatttattaaattttttataattaatctctgctagaaaatttgattaatcatttttagtagaatttgttttttctcaactaggtttt

SEQ ID NO: 5637 - DNA, 636 bp, Artificial; identical to SEQ ID NO: 5104
  Mutations within GlyA3B4 introduced by GmGlyA3B4_T03TALE nuclease

SEQ ID NO: 5638 - DNA, 647 bp, Artificial; identical to SEQ ID NO: 5525
  Mutations within GlyA3B4 introduced by GmGlyA3B4_T03TALE nuclease

SEQ ID NO: 5639 - DNA, 647 bp, Artificial
  Mutations within GlyA3B4 introduced by GmGlyA3B4_T03TALE nuclease
gttcatgtacggttgcagatataaacgaagcatagcttatgtatgaggtgtaacaaaattggaaacaatagccatgcaaggtgaagaatgtcaccaactcagaaacccttcttcattgacgtgtccctcactcactctcctctcttcactataaatcgccactcttcgtgttctccacttcaccaactccttcaaacttattaacactttccttagttcaatatggggaagcccttcttcactctctctctttcttccctttgcttgctactcttgtcgagtgcatgctttgctattacctccagcaagttcgagtgccaactcaacaacctcaacgcgttggaacccgaccaccgcgttgagtccgaaggtggtcttattgaaacatggaactctcaacaccctgagctgcaatgcgccggtgtcactgtttccaaacgcaccctcaaccgcaacggcctccacttgccatcttactcaccttatccccaaatgatcattgtcgttcaaggtgcgtaatattagtaagagtatttatcagcttaacgtgataacaatatagtaatatgaaatatttattaaatttttataattaatctctgctagaaaatttgattaatcattttagtagaatttgttttctcaac

SEQ ID NO: 5640 - DNA, 664 bp, Artificial
  Mutations within GlyA3B4 introduced by GmGlyA3B4_T03TALE nuclease
gttcatgtacggttgcagatataaacgaagcatagcttatgtatgaggtgtaacaaaattggaaacaatagccatgcaaggtgaagaatgtcaccaactcagaaacccttcttcattgacgtgtccctcactcactctcctctcttcactataaatcgccactcttcgtgttctccacttcaccaactccttcaaacttattaacactttccttagttcaatatggggaagcccttcttcactctctctctttcttccctttgcttgctactcttgtcgagtgcatgctttgctattacctccagcaagtagtgccaactcaacaacctcaacgcgttggaacccgaccaccgcgttgagtccgaaggtggtcttattgaaacatggaactctcaacaccctgagctgcaatgcgccggtgtcactgtttccaaatgcaccctcaaccgcaacggcctccacttgccatcttactcaccttatccccaaatgatcattgtcgttcaaggtgcgtaatattagtaagaagtatttatcagcttaacgtgataacaatatagtaatatgaaatatttattaaatttttataattaatctctgctagaaaatttgattaatcattttagtagaatttgtttttctcaactaggtttttaaaacacca

SEQ ID NO: 5641 - DNA, 664 bp, Artificial
  Mutations within GlyA3B4 introduced by GmGlyA3B4_T03TALE nuclease
gttcatgtacggttgcagatataaacgaagcatagcttatgtatgaggtgtaacaaaattggaaacaatagccatgcaaggtgaagaatgtcaccaactcagaaacccttcttcattgacgtgtccctcactcactctcctctcttcactataaatcgccactcttcgtgttctccacttcaccaactccttcaaacttattaacactttccttagttcaatatggggaagcccttcttcactctctctctttcttccctttgcttgctactcttgtcgagtgcatgctttgctattacctccagcaagttagtgccaactcaacaacctcaacgcgttggaacccgaccacagcgttgagtccgaaggtggtcttattgaaacatggaactctcaacaccctgagctgcaatgcgccggtgtcactgtttccaaacgcaccctcaaccgcaacggcctccacttgccatcttactcaccttatccccaaatgatcattgtcgttcaaggtgcgtaatattagtaagaagtatttatcagcttaacgtgataacaatatagtaatatgaaatatttattaaatttttataattaatctctgctagaaaatttgattaatcattttagtagaatttgtttttctcaactaggttttaaaacacca

SEQ ID NO: 5642 - DNA, 665 bp, Artificial
  Mutations within GlyA3B4 introduced by GmGlyA3B4_T03TALE nuclease
gttcatgtacggttgcagatataaacgaagcatagcttatgtatgaggtgtaacaaaattggaaacaatagccatgcaaggtgaagaatgtcaccaactcagaaacccttcttcattgacgtgtccctcactcactctcctctcttcactataaatcgccactcttcgtgttctccacttcaccaactccttcaaacttattaacactttccttagttcaatatggggaagcccttcttcactctctctctttcttccctttgcttgctactcttgtcgagtgcatgctttgctattacctccagcaagttagtgccaactcaacaacctcaacgcgttggaacccgaccaccgcgttgagtccgaaggtggtcttattgaaacatggaactctcaacaccctgagctgcaatgcgccggtgtcactgtttccaaacgcaccctcaaccgcaacggcctccacttgccatcttactcaccttatccccaaatgatcattgtcgttcaaggtgcgtaatattagtaagaagtatttatcagcttaacgtgataacaataatagtaatatgaaatatttattaaatttttataattaatctctgctagaaaatttgattaatcattttagtagaatttgtttttctcaactaggttttaaaacacca

SEQ ID NO: 5643 - DNA, 646 bp, Artificial; identical to SEQ ID NO: 5479
  Mutations within GlyA3B4 introduced by GmGlyA3B4_T03TALE nuclease

SEQ ID NO: 5644 - DNA, 665 bp, Artificial; identical to SEQ ID NO: 4918
  Mutations within GlyA3B4 introduced by GmGlyA3B4_T03TALE nuclease

SEQ ID NO: 5645 - DNA, 648 bp, Artificial
  Mutations within GlyA3B4 introduced by GmGlyA3B4_T03TALE nuclease
gttcatgtacggttgcagatataaacgaagcatagcttatgtatgaggtgtaacaaaattggaaacaatagccatgcaaggtgaagaatgtcaccaactaccagaaacccttcttcattgacgtcgtccctcactcactctcctctcttcactataaatcgccactcttcgtgttctccacttcaccaactccttcaaacttattaacactttccttagttcaatatggggaagcccttcttcactctctctctttcttccctttgcttgctactcttgtcgagtgcatgctttgctattacctccagcaagttcgtgccaactcaacaacctcaacgcgttggaacccgaccaccgcgttgagtccgaaggtggtcttattgaaacatggaactctcaacaccctgagctgcaatgcgccggtgtcactgtttccaaacgcaccctcaaccgcaacggcctccacttgccatcttactcaccttatccccaaatgatcattgtcgttcaaggtgcgtaatattagtaagaagtatttatcagcttaacgtgataacaatatagtaatatgaaatatttattaaatttttataattaatctctgctagaaaatttgattaatcattttagtagaatttgttttctcaa

SEQ ID NO: 5646 - DNA, 644 bp, Artificial
  Mutations within GlyA3B4 introduced by GmGlyA3B4_T03TALE nuclease
gttcatgtacggttgcagatataaacgaagcatagcttatgtatgaggtgtaacaaaattggaaacaatagccatgcaaggtgaagaatgtcaccaactcagaaacccttcttcattgacgtgtccctcactcactctcctctcttcactataaatcgccactcttcgtgttctccacttcaccaactccttcaaacttattaacactttccttagttcaatatggggaagcccttcttcactctctctctttcttccctttgcttgctactcttgtcgagtgcatgctttgccaactcaacaacctcaacgcgttggaacccgaccaccgcgttgagtccgaaggtggtcttattgaaacatggaactctcaacaccctgagctgcaatgcgccggtgtcactgtttccaaacgcaccctcaaccgcaacggcctccacttgccatcttactcaccttatccccaaatgatcattgtcgttcaaggtgcgtaatattagtaagaagtatttatcagcttaacgtgataacaataatagtaatatgaaatatttattaaattttttataattaatctctgctagaaaatttgattaatcatttttagtagaatttgttttttctcaactaggttttaaacacca

SEQ ID NO: 5647 - DNA, 633 bp, Artificial; identical to SEQ ID NO: 5539
  Mutations within GlyA3B4 introduced by GmGlyA3B4_T03TALE nuclease

SEQ ID NO: 5648 - DNA, 539 bp, Artificial
  Mutations within GlyA3B4 introduced by GmGlyA3B4_T03TALE nuclease
gttcatgtacggttgcagatataaacgaagcatagcttatgtatgaggtgtaacaaaattggaaacaatagccatgcaaggtgaagaatgtcaccaactcagaaacccttcttcattgacgtgtccctcactcactctcctctcttcactataaatcgccactcttcgtgttctccacttcaccaactccttcaaacttattaacactttccttagttcaataagaccaccgcgttgagtccgaaggtggtcttattgaacatggaactctcaacaccctgagctgcaatgcgccggtgtcactgtttccaaacgcaccctcaaccgcaacggcctccacttgccatcttactcaccttatccccaaatgatcattgtcgttcaaggtgcgtaatattagtaagaagtatttatcagcttaacgtgataacaataatagtaatatgaaatatttattaaattttttataattaatctctgctagaaatttgattaatcatttttagtagaatttgtttttctcaactaggttttaaaca

SEQ ID NO: 5649 - DNA, 664 bp, Artificial
  Mutations within GlyA3B4 introduced by GmGlyA3B4_T03TALE nuclease
gttcatgtacggttgcagatataaacgaagcatagcttatgtatgaggtgtaacaaaattggaaacaatagccatgcaaggtgaagaatgtcaccaactcagaaacccttcttcattgacgtgtccctcactcactctcctctcttcactataaatcgccactcttcgtgttctccacttcaccaactccttcaaacttattaacactttccttagttcaatatggggaagcccttcttcactctctctctttcttccctttgcttgctactcttgtcgagtgcatgctttgctattacctccagcaagttcgtgccaactcaacaacctcaacgcgttggaacccgaccaccgcgttgagtccgaaggtggtcttattgaaacatggaactctcaacaccctgagctgcaatgcgccggtgtcactgtttccaaacgcaccctcaaccgcaacggcctccacttgccatcttactcaccttatcccccaaatgatcattgtcgttcaaggtgcgtaatattagtaagaagtatttatcagcttaacgtgataacaatatagtaatatgaaatatttattaaatttttataattaatctctgctagaaaatttgattaatcattttagtagaatttgttttctcaactaggttttaaaacacca

SEQ ID NO: 5650 - DNA, 614 bp, Artificial
  Mutations within GlyA3B4 introduced by GmGlyA3B4_T03TALE nuclease
gttcatgtacggttgcagatataaacgaagcatagcttatgtatgaggtgtaacaaaattggaaacaatagccatgcaaggtgaagaatgtcaccaactcagaaacccttcttcattgacgtgtccctcactcactctcctctcttcactataaatcgccactcttcgtgttctccacttcaccaactccttcaaacttattaacactttccttagttcaatatggggaagcccttcttcactctctctctttcttccctttgcttgctactcttgtcgagtgcatgctttgctattaaaacatggaactcactgagtccgaaggtggtcttattgaaacatggaactctcaacaccctgagctgcaatgcgccggtgtcactgtttccaaacgcaccctcaaccgcaacggcctccacttgccatcttactcaccttatccccaaatgatcattgtcgttcaaggtgcgtaatattagtaagaagtatttatcagcttaacgtgataacaataatagtaatatgaaatatttattaattttttataattaatctctgctagaaaatttgattaatcatttttagtagaatttgtttttctcaactaggttttt

SEQ ID NO: 5651 - DNA, 661 bp, Artificial
  Mutations within GlyA3B4 introduced by GmGlyA3B4_T03TALE nuclease
gttcatgtacggttgcagatataaacgaagcatagcttatgtatgaggtgtaacaaaattggaaacaatagccatgcaaggtgaagaatgtcaccaactcagaaacccttcttcattgacgtgtccctcactcactctcctctcttcactataaatcgccactcttcgtgttctccacttcaccaactccttcaaacttattaacactttccttagttcaatatggggaagcccttcttcactctctctctttcttccctttgcttgctactcttgtcgagtgcatgctttgctattacctccagcaagtgccaactcaacaacctcaacgcgttggaacccgaccaccgcgttgagtccgaaggtggtcttattgaaacatggaactctcaacaccctgagctgcaatgcgccggtgtcactgtttccaaacgcaccctcaaccgcaacggcctccacttgccatcttactcaccttatccccaaatgatcattgtcgttcaaggtgcgtaatattagtaagaagtatttatcagcttaacgtgataacaatatagtaatatgaaatatttattaaatttttataattaatctctgctagaaaatttgattaatcattttagtagaatttgtttttctcaactaggtttttaaaacacca

SEQ ID NO: 5652 - DNA, 568 bp, Artificial
  Mutations within GlyA3B4 introduced by GmGlyA3B4_T03TALE nuclease
gttcatgtacggttgcagatataaacgaagcatagcttatgtatgaggtgtaacaaaattggaaacaatagccatgcaaggtgaagaatgtcaccaactcagaaacccttcttcattgacgtgtccctcactcactctcctctcttcactataaatcgccactcttcgtgttctccacttcaccaactccttcaaacttattaacactttccttagttcaatatggggaagcccttcttcactctctctctttcttcccgaccaccgcgttgagtccgaaggtggtcttattgaaacatggaactctcaacaccctgagctgcaatgcgccggtgtcactgtttccaaacgcaccctcaaccgcaacggcctccacttgccatcttactcaccttatccccaaaatgatcattgtcgttcaaggtgcgtaatattagtaagaagtatttatcagcttaacgtgataacaataatagtaatatgaaatatttattaaattttttataattaatctctgctagaaaatttgattaatcatttttagtagaatttgtttttctcaactagg

SEQ ID NO: 5653 - DNA, 370 bp, Artificial
  Mutations within GlyA3B4 introduced by GmGlyA3B4_T03TALE nuclease
gttcatgtacggttgcagatataaacgaagcatagcttatgtatgaggtgtaacaaaattggaaacaatagccatgcaaggtgaagaatgtcaccaactcagaaaccccttcttcattgacgtgtccctcactcactctcctctcttcactataaatcgccactcttcgtgttctccacttcaccaactccttcaaacttattaacactttccttagttcaatatggggaagcccttcttcactctctctctttcttccctttgcttgctactcttgtcgagtgcatgctttgctattacctccagtgccaactcacaacctcaacgcgttgacccgaccaccgcgttgagtccgaaggtggtcttattg

SEQ ID NO: 5654 - DNA, 648 bp, Artificial
  Mutations within GlyA3B4 introduced by GmGlyA3B4_T03TALE nuclease
gttcatgtacggttgcagatataaacgaagcatagcttatgtatgaggtgtaacaaaattggaaacaatagccatgcaaggtgaagaatgtcaccaactcagaaacccttcttcattgacgtgtccctcactcactctcctctcttcactataaatcgccactcttcgtgttctccacttcaccaactccttcaaacttattaacactttccttagttcaatatggggaagcccttcttcactctctctctttcttccctttgcttgctactcttgtcgagtgcatgcttttgctattacctccagcaagttgagtgccaactcaacaacctcaacgcgttggaacccgaccaccgcgttgagtccgaaggtggtcttattgaaacatggaactctcaacaccctgagctgcaatgcgccggtgtcactgtttccaaacgcaccctcaaccgcaacggcctccacttgccatcttactcaccttatccccaaatgatcattgtcgttcaaggtgcgtaatattagtaagaagtatttatcagcttaacgtgataacaataatagtaatatgaaatatttattaaatttttataattaatctctgctagaaaatttgattaatcattttagtagaatttgttttctcaa

SEQ ID NO: 5655 - DNA, 644 bp, Artificial
  Mutations within GlyA3B4 introduced by GmGlyA3B4_T03TALE nuclease
gttcatgtacggttgcagatataaacgaagcatagcttatgtatgaggtgtaacaaaattggaaacaatagccatgcaaggtgaagaatgtcaccaactcagaaacccttcttcattgacgtgtccctcactcactctcctctcttcactataaatcgccactcttcgtgttctccacttcaccaactccttcaaacttattaacactttccttagttcaatatggggaagcccttcttcactctctctctttcttccctttgcttgctactcttgtcgagtgcatgctttgctattacctccagcaagtcaaggctactaacaacctcaacgcgttggaacccgaccaccgcgttgagtccgaaggtggtcttattgaaacatggaactctcaacaccctgagctgcaatgcgccggtgtcactgtttccaaacgcaccctcaaccgcaacggcctccacttgccatcttactcaccttatccccaaatgatcattgtcgttcaaggtgcgtaatattagtaagaagtatttatcagcttaacgtgataacaatatagtaatatgaaatatttattaaatttttataattaatctctgctagaaaatttgattaatcattttagtagaatttgtttttctcaa

SEQ ID NO: 5656 - DNA, 646 bp, Artificial; identical to SEQ ID NO: 4907
  Mutations within GlyA3B4 introduced by GmGlyA3B4_T03TALE nuclease

SEQ ID NO: 5657 - DNA, 631 bp, Artificial
  Mutations within GlyA3B4 introduced by GmGlyA3B4_T03TALE nuclease
gttcatgtacggttgcagatataaacgaagcatagcttatgtatgaggtgtaacaaaattggaaacaatagccatgcaaggtgaagaatgtcaccaactcagaaacccttcttcattgacgtgtccctcactcactctcctctcttcactataaatcgccactcttcgtgttctccacttcaccaactccttcaaacttattaacactttccttagttcaatatggggaagcccttcttcactctctctctttcttccctttgcttgctactcttgtcgagtgcatgctttgctattacctccagctagtgccaactcaacaacctcaacgcgttggaacccgaccaccgcgttgagtccgaaggtggtcttattgaaacatggaactctcaacaccctgagctgcaatgcgccggtgtcactgtttccaaacgcaccctcaaccgcaacggcctccacttgccatcttactcaccttatccccaaatgatcattgtcgttcaaggtgcgtaatattagtaagaagtatttatcagcttaacgtgataacaatatagtaatatgaaatatttattaaatttttataattaatctctgctagaaaatttgattaatcattttagtagaattt

SEQ ID NO: 5658 - DNA, 663 bp, Artificial
  Mutations within GlyA3B4 introduced by GmGlyA3B4_T03TALE nuclease
gttcatgtacggttgcagatataaacgaagcatagcttatgtatgaggtgtaacaaaattggaaacaatagccatgcaaggtgaagaatgtcaccaactcagaaacccttcttcattgacgtgtccctcactcactctcctctcttcactataaatcgccactcttcgtgttctccacttcaccaactccttcaaacttattaacactttccttagttcaatatggggaagcccttcttcactctctctctttcttccctttgcttgctactcttgtcgagtgcatgctttgctattacctccagcaagttctgccaactcaacaacctcaacgcgttggaacccgaccaccgcgttgagtccgaaggtggtcttattgaaacatggaactctcaacaccctgagctgcaatgcgccggtgtcactgtttccaaacgcaccctcaaccgcaacggcctccacttgccatcttactcaccttatccccaactgatcattgtcgttcaaggtgcgtaatattagtaagaagtatttatcagcttaacgtgataacaataatagtaatatgaaatatttattaaatttttataattaatctctgctagaaaatttgattaatcattttagtagaatttgtttttctcaactaggttttaaacacca

SEQ ID NO: 5659 - DNA, 646 bp, Artificial
  Mutations within GlyA3B4 introduced by GmGlyA3B4_T03TALE nuclease
gttcatgtacggttgcagatataaacgaagcatagcttatgtatgaggtgtaacaaaattggaaacaatagccatgcaaggtgaagaatgtcaccaactcagaaacccttcttcattgacgtgtccctcactcactctcctctcttcactataaatcgccactcttcgtgttctccacttcaccaactccttcaaacttattaacactttccttagttcaatatggggaagcccttcttcactctctctctttcttccctttgcttgctactcttgtcgagtgcatgctttgctattacctccagcaagtagtgccaactcaacaacctcaacgcgttggaacccgaccaccgcgttgagtccgaaggtggtcttattgaaacatggaactctcaacaccctgagctgcatgcgccggtgtcactgtttccaaacgcaccctcaaccgcaacggcctccacttgccatcttactcaccttatccccaaatgatcattgtcgttcaaggtgcgtaatattagtaagaagtatttatcagcttaacgtgataacaataatagtaatatgaaatatttattaaatttttataattaatctctgctagaaaatttgattaatcatttttagtagaatttgtttttctcaa

SEQ ID NO: 5660 - DNA, 639 bp, Artificial
  Mutations within GlyA3B4 introduced by GmGlyA3B4_T03TALE nuclease
gttcatgtacggttgcagatataaacgaagcatagcttatgtatgaggtgtaacaaaattggaaacaatagccatgcaaggtgaagaatgtcaccaactcagaaacccttcttcattgacgtgtccctcactcactctcctctcttcactataaatcgccactcttcgtgttctccacttcaccaactccttcaaacttattaacactttccttagttcaatatggggaagcccttcttcactctctctctttcttccctttgcttgctactcttgtcgagtgcatgctttgctattacctccagcgttggaacccgaccaccgcgttgagtccgaaggtggtcttattgaaacatggaactctcaacaccctgagctgcaatgcgccggtgtcactgtttccaaacgcaccctcaaccgcaacggcctccacttgccatcttactcaccttatccccaaatgatcattgtcgttcaaggtgcgtaatattagtaagaagtatttatcagcttaacgtgataacaataatagtaatatgaaatatttattaaattttttataattaatctctgctagaaaatttgattaatcatttttagtagaatttgttttttctcaactaggttttaaacaccaca

SEQ ID NO: 5661 - DNA, 661 bp, Artificial; identical to SEQ ID NO: 5046
  Mutations within GlyA3B4 introduced by GmGlyA3B4_T03TALE nuclease

SEQ ID NO: 5662 - DNA, 664 bp, Artificial
  Mutations within GlyA3B4 introduced by GmGlyA3B4_T03TALE nuclease
gttcatgtacggttgcagatataaacgaagcatagcttatgtatgaggtgtaacaaaattggaaacaatagccatgcaaggtgaagaatgtcaccaactcagaaacccttcttcattgacgtgtccctcactcactctcctctcttcactataaatcgccactcttcgtgttctccacttcaccaactccttcaaacttattaacactttccttagttcaatatggggaagcccttcttcactctctctctttcttccctttgcttgctactcttgtcgagtgcatgctttgctattacctccagcaagagtgccaactcaacaacctcaacgcgttggaacccgaccaccgcgttgagtccgaaggtggtcttattgaaacatggaactctcaacaccctgagctgcaatgcgccggtgtcactgtttccaaacgcaccctcaaccgcaacggcctccacttgccatcttactcaccttatccccaaatgatcattgtcgttcaaggtgcgtaatattagtaagaagtatttatcagcttaacgtgataacaataatagtaatatgaaatatttattaaatttttataattaatctctgctagaaaatttgattaatcattttagtagaatttgtttttctcaactaggtttttaaaacacca

SEQ ID NO: 5663 - DNA, 633 bp, Artificial
  Mutations within GlyA3B4 introduced by GmGlyA3B4_T03TALE nuclease
gttcatgtacggttgcagatataaacgaagcatagcttatgtatgaggtgtaacaaaattggaaacaatagccatgcaaggtgaagaatgtcaccaactcagaaacccttcttcattgacgtgtccctcactcactctcctctcttcactataaatcgccactcttcgtgttctccacttcaccaactccttcaaacttattaacactttccttagttcaatatggggaagcccttcttcactctctctctttcttccctttgcttgctactcttgtcgagtgcatgctttgctattacctccagctagtgccaactcaacaacctcaacgcgttggaacccgaccaccgcgttgagtccgaaggtggtcttattgaaacatggaactctcaacaccctgagctgcaatgcgccggtgtcactgtttccaaacgcaccctcaaccgcaacggcctccacttgccatcttactcaccttatccccaaatgatcattgtcgttcaaggtgcgtaatattagtaagaagtatttatcagcttaacgtgataacaataatagtaatatgaaatatttattaaatttttataattaatctctgctagaaaatttgattaatcattttagtagaatttg

SEQ ID NO: 5664 - DNA, 659 bp, Artificial; identical to SEQ ID NO: 4859
  Mutations within GlyA3B4 introduced by GmGlyA3B4_T03TALE nuclease

SEQ ID NO: 5665 - DNA, 503 bp, Artificial
  Mutations within GlyA3B4 introduced by GmGlyA3B4_T03TALE nuclease
gttcatgtacggttgcagatataaacgaagcatagcttatgtatgaggtgtaacaaaattggaaacaatagccatgcaaggtgaagaatgtcaccaactcagaaacccttcttcattgacgtgtccctcactcactctcctctcttcaacgagtgccaactcaacaacctcaacgcgttggaacccgaccaccgcgttgagtccgaaggtggtcttattgaaacatggaactctcaacaccctgagctgcaatgcgccggtgtcactgtttccaaacgcaccctcaaccgcaacggcctccacttgccatcttactcaccttatccccaaatgatcattgtcgttcaaggtgcgtaatattagtaagaagtatttatcagcttaacgtgataacaataatagtaatatgaaatatttattaaattttttataattaatctctgctagaaaatttgattaatcatttttagtagaatttgtttttctcaactaggttttaaaca

SEQ ID NO: 5666 - DNA, 630 bp, Artificial
  Mutations within GlyA3B4 introduced by GmGlyA3B4_T03TALE nuclease
gttcatgtacggttgcagatataaacgaagcatagcttatgtatgaggtgtaacaaaattggaaacaatagccatgcaaggtgaagaatgtcaccaactcagaaacccttcttcattgacgtgtccctcactcactctcctctcttcactataaatcgccactcttcgtgttctccacttcaccaactccttcaaacttattaacactttccttagttcaatatggggaagcccttcttcactctctctctttcttccctttgcttgctactcttgtcgagtgccaactcaacaacctcaacgcgttggaacccgaccaccgcgtttgagtccgaaggtggtcttattgaaacatggaactctcaacaccctgagctgcaatgcgccggtgtcactgtttccaaacgcaccctcaaccgcaacggcctccacttgccatcttactcaccttatccccaaatgatcattgtcgttcaaggtgcgtaatattagtaagaagtatttatcagcttaacgtgataacaataatagtaatatgaatatttattaatttttataattaatctctgctagaaaatttgattaatcatttttagtagaatttgtttttctcaactaggtttttaaaca

SEQ ID NO: 5667 - DNA, 622 bp, Artificial
  Mutations within GlyA3B4 introduced by GmGlyA3B4_T03TALE nuclease
gttcatgtacggttgcagatataaacgaagcatagcttatgtatgaggtgtaacaaaattggaaacaatagccatgcaaggtgaagaatgtcaccaactcagaaacccttcttcattgacgtgtccctcactcactctcctctcttcactataaatcgccactcttcgtgttctccacttcaccaactccttcaaacttattaacactttccttagttcaatatggggaagcccttcttcactctctctctttcttccctttgcttgctactcttgtcgagtgcatgctttgctattacctccagcaagttcgtgccaactcaacaacctcaacgcgttggaacccgaccaccgcgttgagtccgaaggtggtcttattgaaacatggaactctcaacaccctgagctgcaatgcgccggtgtcactgtttccaaacgcaccctcaaccgcaacggcctccacttgccatcttactcaccttatccccaaatgatcattgtcgttcaaggtgcgtaatattagtaagaagtatttatcagcttaacgtgataacaataatagtaatatgaaatatttattaaatttttataatttaatctctgctagaaaatttgattaatc

SEQ ID NO: 5668 - DNA, 635 bp, Artificial
  Mutations within GlyA3B4 introduced by GmGlyA3B4_T03TALE nuclease
gttcatgtacggttgcagatataaacgaagcatagcttatgtatgaggtgtaacaaaattggaaacaatagccatgcaaggtgaagaatgtcaccaactcagaaacccttcttcattgacgtgtccctcactcactcatcctctcttcactataaatcgccactcttcgtgttctccacttcaccaactccttcaaacttattaacactttccttagttcaatatggggaagcccttcttcactctctctctttcttccctttgcttgctactcttgtcgagtgcatgctttgccaactcaacaacctcaacgcgttggaacccgaccaccgcgttgagtccgaaggtggtcttattgaaacatggaactctcaacaccctgagctgcaatgcgccgggtgtcactgttttccaaacgcaccctcaaccgcaacggcctccacttgccatcttactcaccttatccccaaatgatcattgtcgttcaggtgcgtaatattagtaagaagtatttatcagctttaacgtgataacaataatagtaatatgaaatatttattaaatttttttataattaatctctgctagaaaatttgattaatcattttttagtagaatttgttttttctcaacta

SEQ ID NO: 5669 - DNA, 665 bp, Artificial
  Mutations within GlyA3B4 introduced by GmGlyA3B4_T03TALE nuclease
gttcatgtacggttgcagatataaacgaagcatagcttatgtatgaggtgtaacaaaagtttggaaacaatagccatgcaaggtgaagaattgtcaccaactcagaaaccccttcttcattgacgtgtccctcactcactctcctctcttcactataaatcgccactcttcgtgttctccacttcaccaactccttcaaacttattacactttccttagttcaatatggggaaagcccttcttcactctctctctttcttccctttgcttgctactcttgtcgagtgcatgcttttgctattacctccagcaagtgccaactcaacaacctcacgcgttggaacccgaccaccgcgttgagtccgaaggtggtcttattgaaacatggaactctcaacaccctgagctgcaatgcgccggtgtcactgtttccaaacgcaccctcaaccgcaacggcctccacttgccatcttactcaccttatccccaaatgatcattgtcgttcaaggtgcgtaatattagtaagaagtatttatcagcttaacgtgataacaatatagtaatatgaaatatttattaaatttttataattaatctctgctagaaaatttgattaatcattttagtagaatttgtttttctcaactaggtttttaaaacacca

SEQ ID NO: 5670 - DNA, 644 bp, Artificial
  Mutations within GlyA3B4 introduced by GmGlyA3B4_T03TALE nuclease
gttcatgtacggttgcagatataaacgaagcatagcttatgtatgaggtgtaacaaaattggaaacaatagccatgcaaggtgaagaatgtcaccaactcagaaacccttcttcattgacgtgtccctcactcactctcctctcttcactataaatcgccactcttcgtgttctccacttcaccaactccttcaaacttattaacactttccttagttcaatatggggaagcccttcttcactctctctctttcttccctttgcttgctactcttgtcgagtgcatgctttgctattacctccagcaagtgccaactcaacaacctcaacgcgttggaacccgaccaccgcgttgagtccgaaggtggtcttattgaaacatggaactctcaacaccctgagctgcaatgcgccggtgtcactgtttccaaacgcaccctcaaccgcaacggcctccacttgccatcttactcaccttatccccaaatgatcattgtcgttcaaggtgcgtaatattagtaagaagtatttatcagcttaacgtgataacaataatagtaatatgaaatatttattaaatttttataattaatctctgctagaaaatttgattaatcatttttagtagaatttgtttttctcaa

SEQ ID NO: 5671 - DNA, 677 bp, Artificial
  Mutations within GlyA3B4 introduced by GmGlyA3B4_T03TALE nuclease
gttcatgtacggttgcagatataaacgaagcatagcttatgtatgaggtgtaacaaaattggaaacaatagccatgcaaggtgaagaatgtcaccaactcagaaacccttcttcattgacgtgtccctcactcactctcctctcttcactataaatcgccactcttcgtgttctccacttcaccaactccttcaaacttattaacactttccttagttcaatatggggaagcccttcttcactctctctctttcttccctttgcttgctactcttgtcgagtgcatgctttgctattacctccagcaagttcaaaatattgctggcgatggccaccacctgctccggggtcaagccgtgggcctggcacagcaccggcaacgagtgccaactcaacaacctcaacgcgttggaacccgaccaccgcgttgagtccgaaggtggtcttattgaaacatggaactctcaacaccctgagctgcaatgcgccggtgtcactgtttccaaacgcacctcaaccgcaacggcctccacttgccatcttactcaccttatccccaaatgatcattgtcgttcaaggtgcgtaatattagtaagaagtatttatcagcttaacgtgataacaataatagtaatatgaaatatttattaaattttttataattaatctctgctag

SEQ ID NO: 5672 - DNA, 661 bp, Artificial; identical to SEQ ID NO: 5046
  Mutations within GlyA3B4 introduced by GmGlyA3B4_T03TALE nuclease

SEQ ID NO: 5673 - DNA, 665 bp, Artificial; identical to SEQ ID NO: 4918
  Mutations within GlyA3B4 introduced by GmGlyA3B4_T03TALE nuclease

SEQ ID NO: 5674 - DNA, 663 bp, Artificial
  Mutations within GlyA3B4 introduced by GmGlyA3B4_T03TALE nuclease
gttcatgtacggttgcagatataaacgaagcatagcttatgtatgaggtgtaacaaaattggaaacaatagccatgcaaggtgaagaatgtcaccaactcagaaacccttcttcattgacgtgtccctcactcactctcctctcttcactataaatcgccactcttcgtgttctccacttcaccaactccttcaaacttattaacactttccttagttcaatatggggaagcccttcttcactctctctctttcttccctttgcttgctactcttgtcgagtgcatgctttgctattacctccagcaagtgagtgccaactcaacaacctcaacgcgttggaacccgaccaccgcgttgagtccgaaggtggtcttattgaaacatggaactctcaacaccctgagctgcaatgcgccggtgtcactgtttccaaacgcaccctcaaccgcaacggcctccacttgccatcttactcaccttatccccaaatgatcattgtcgttcaaggtgcgtaatattagtaagaagtatttatcagcttaacgtgataacaataatagtaatatgaaatatttattaaatttttataattaatctctgctagaaaatttgattaatcattttagtagaatttgttttctcaactaggttttaaaacacc

SEQ ID NO: 5675 - DNA, 659 bp, Artificial
  Mutations within GlyA3B4 introduced by GmGlyA3B4_T03TALE nuclease
gttcatgtacggttgcagatataaacgaagcatagcttatgtatgaggtgtaacaaaattggaaacaatagccatgcaaggtgaagaatgtcaccaactcagaaacccttcttcattgacgtgtccctcactcactctcctctcttcactataaatcgccactcttcgtgttctccacttcaccaactccttcaaacttattaacactttccttagttcaatatggggaagcccttcttcactctctctctttcttccctttgcttgctactcttgtcgagtgcatgctttgctattacctccagcaagttcaactcaacaacctcaacgcgttggaacccgaccaccgcgttgagtccgaaggtggtcttattgaaacatggaactctcaacaccctgagctgcaatgcgccggtgtcactgtttccaaacgcaccctcaaccgcaacggcctccacttgccatcttactcaccttatccccaaatgatcattgtcgttcaaggtgcgtaatattagtaagaagtatttatcagcttaacgtgataacaatatagtaatatgaaatatttattaaatttttataattaatctctgctagaaaatttgattaatcattttagtagaatttgttttctcaactaggtttttaaaacacca

SEQ ID NO: 5676 - DNA, 458 bp, Artificial
  Mutations within GlyA3B4 introduced by GmGlyA3B4_T03TALE nuclease
gttcatgtacggttgcagatataaacgaagcatagcttatgtatgaggtgtaacaaaattggaaacaatagccatgcaaggtgaagaatgtcaccaactcagaaacccttcttcattgacgtgtccctcactcactctcctctcttcactataaatcgccactcttcgtgttctccacttcaccaactccttcaaacttattaacactttccttagttcaatatggggaagcccttcttcactctctctctttcttccctttgcttgcaactcaacaacctcaacgcgttggaacccgaccaccgcgttgagtccgaaggtggtcttattgaaacatggaactctcaacaccctgagctgcaatgcgccggtgtcactgtttccaaacgcaccctcaaccgcaacggccctccacttgccatcttactcaccttatccccaaatgatcattgtcgttc

SEQ ID NO: 5677 - DNA, 672 bp, Artificial
  Mutations within GlyA3B4 introduced by GmGlyA3B4_T03TALE nuclease
gttcatgtacggttgcagatataaacgaagcatagcttatgtatgaggtgtaatcaaaattggaaacaatagccatgcaaggtgaagaatgtcaccaactcagaaacccttcttcattgacgtgtccctcactcactctcctctcttcactataaaatcgccactcttcgtgttctccacttcaccaactccttcaaacttattaacactttccttagttcaatatgggggaagcccttcttcactctctctctttcttccctttgcttgctactcttgtcgagtgcatgctttgctatttacctccagcaagtacgccaactcaacaacctcaacgcgttggaacccgaccaccgcgttgagtccgaaggtggtcttattgaaacatggaactctcaacaccctgagctgcaatgcgccggtgtcactgtttccaaacgcaccctcaaccgcaacggccgtccacttgccatcttactcaccttatcccccaaatgatcattgtcgttcaaggtgcgtaatattagtaagaagtatttatcagcttaacgtgataacaataatagtaatatgaaaatatttattaaatttttataattaatctctgctagaaaatttgattaatcattttagtagaatttgttttctcaactaggtttttaaaacaccaca

SEQ ID NO: 5678 - DNA, 646 bp, Artificial; identical to SEQ ID NO: 4907
  Mutations within GlyA3B4 introduced by GmGlyA3B4_T03TALE nuclease

SEQ ID NO: 5679 - DNA, 650 bp, Artificial
  Mutations within GlyA3B4 introduced by GmGlyA3B4_T03TALE nuclease
gttcatgtacggttgcagatataaacgaagcatagcttatgtatgaggtgtaacaaaattggaaacaatagccatgcaaggtgaagaatgtcaccaactcagaaacccttcttcattgacgtgtccctcactcactctcctctcttcactataaatcgccactcttcgtgttctccacttcaccaactccttcaaacttattaacactttccttagttcaatatggggaagcccttcttcactctctctctttcttccctttgcttgctactcttgtcgagtgcatgctttgctattacctccaacaacctcaacgcgttggaacccgaccaccgcgttgagtccgaaggtggtcttattgaaacatggaactctcaacaccctgagctgcaatgcgccggtgtcactgtttccaaacgcaccctcaaccgcaacggcctccacttgccatcttactcaccttatccccaaatgatcattgtcgttcaaggtgcgtaatattagtaagaagtatttatcagcttaacgtgataacaataatagtaatatgaaatatttattaaattttttataattaatctctgctagaaaatttgattaatcatttttagtagaatttgttttttctcaactaggttttaaacaccaca

SEQ ID NO: 5680 - DNA, 645 bp, Artificial
  Mutations within GlyA3B4 introduced by GmGlyA3B4_T03TALE nuclease
gttcatgtacggttgcagatataaacgaagcatagcttatgtatgaggtgtaacaaaattggaaacaatagccatgcaaggtgaagaatgtcaccaactcagaaacccttcttcattgacgtgtccctcactcactctcctctcttcactataaatcgccactcttcgtgttctccacttcaccaactccttcaaacttattaacactttccttagttcaatatggggaagcccttcttcactctctctctttcttccctttgcttgctactcttgtcgagtgcatgctttgctattacctccagcaaagtgccaactcaacaacctcaacgcgttggaacccgaccaccgcgttgagtccgaaggtggtcttattgaaacatggaactctcaacaccctgagctgcaatgcgccggtgtcactgtttccaaacgcaccctcaaccgcaacggcctccacttgccatcttactcaccttatccccaaatgatcattgtcgttcaaggtgcgtaatattagtaagaagtatttatcagcttaacgtgataacaataatagtaatatgaaatatttattaaatttttataatttaatctctgctagaaaatttgattaatcattttagtagaatttgttttctcaac

SEQ ID NO: 5681 - DNA, 632 bp, Artificial
  Mutations within GlyA3B4 introduced by GmGlyA3B4_T03TALE nuclease
gttcatgtacggttgcagatataaacgaagcatagcttatgtatgaggtgtaacaaaattggaaacaatagccatgcaaggtgaagaatgtcaccaactcagaaacccttcttcattgacgtgtccctcactcactctcctctcttcactataaatcgccactcttcgtgttctccacttcaccaactccttcaaacttattaacactttccttagttcaatatggggaagcccttcttcactctctctctttcttccctttgcttgctactcttgtcgagtgcatgctttgctattacctccagcaaacgccaactcaacaacctcaacgcgttggaacccgaccaccgcgttgagtccgaaggtggtcttattgaaacatggaactctcaacaccctgagctgcaatgcgccggtgtcactgtttccaaacgcaccctcaaccgcaacggcctccacttgccatcttactcaccttatccccaaatgatcattgtcgttcaaggtgcgtaatattagtaagaagtatttatcagcttaacgtgataacaatatagtaatatgaaatatttattaaatttttataattaatctctgctagaaaatttgattaatcattttagtagaatttg

SEQ ID NO: 5682 - DNA, 574 bp, Artificial
  Mutations within GlyA3B4 introduced by GmGlyA3B4_T03TALE nuclease
gttcatgtacggttgcagatataaacgaagcatagcttatgtatgaggtgtaacaaaattggaaacaatagccatgcaaggtgaagaatgtcaccaactcagaaacccttcttcattgacgtgtccctcactcactctcctctcttcactataaatcgccactcttcgtgttctccacttcaccaactccttcaaacttattaacactttccttagttcaatatggggaagcccttcttcactctctctctttcttccctttgcttgctactcttgagtccgaaggtggtcttattgaaacatggaactctcaacaccctgagctgcaatgcgccggtgtcactgtttccaaacgcaccctcaaccgcaacggcctccacttgccatcttactcaccttatccccaaatgatcattgtcgttcaaggtgcgtaatattagtaagaagtatttatcagcttaacgtgataacaataatagtaatatgaaatatttattaaattttttatattaatctctgctagaaaatttgattaatcattttagtagaatttgtttttctcaactaggttttt

SEQ ID NO: 5683 - DNA, 631 bp, Artificial
  Mutations within GlyA3B4 introduced by GmGlyA3B4_T03TALE nuclease
gttcatgtacggttgcagatataaacgaagcatagcttatgtatgaggtgtaacaaaattggaaacaatagccatgcaaggtgaagaatgtcaccaactcagaaacccttcttcattgacgtgtccctcactcactctcctctcttcactataaatcgccactcttcgtgttctccacttcaccaactccttcaaacttattaacactttccttagttcaatatggggaagcccttcttcactctctctctttcttccctttgcttgctactcttgtcgagtgcatgctttgctaacaacctcaacgcgttggaacccgaccaccgcgttgagtccgaaggtggtcttattgaaacatggaactctcaacaccctgagctgcaatgcgccggtgtcactgtttccaaacgcaccctcaaccgcaacggcctccacttgccatcttactcaccttatccccaaatgatcattgtcgttcaaggtgcgtaatattagtaagaagtatttatcagcttaacgtgataacaataatagtaatatgaaatatttattaaattttttataattaatctctgctagaaaatttgattaatcatttttagtagaatttgttttttctcaactaggtttt

SEQ ID NO: 5684 - DNA, 584 bp, Artificial
  Mutations within GlyA3B4 introduced by GmGlyA3B4_T03TALE nuclease
gttcatgtacggttgcagatataaacgaagcatagcttatgtatgaggtgtaacaaaattggaaacaatagccatgcaaggtgaagaatgtcaccaactcagaaacccttcttcattgacgtgtccctcactcactctcctctcttcactataaatcgccactcttcgtgttctccacttcaccaactccttcaaacttattaacactttccttagttcaatatggggaagcccttcttcactctctctctttcttcaacaacctcaacgcgttggaacccgaccaccgcgttgagtccgaaggtggtcttattgaaacatggaactctcaacaccctgagctgcaatgcgccggtgtcactgtttccaaacgcaccctcaaccgcaacggcctccacttgccatcttactcaccttatccccaaatgatcattgtcgttcaaggtgcgtaatattagtaagaagtatttatcagcttaacgtgataacaataatagtaatatgaaatatttattaaattttttataattaatctctgctagaaaatttgattaatcatttttagtagaatttgtttttctcaa

SEQ ID NO: 5685 - DNA, 617 bp, Artificial
  Mutations within GlyA3B4 introduced by GmGlyA3B4_T03TALE nuclease
gttcatgtacggttgcagatataaacgaagcatagcttatgtatgaggtgtaacaaaattggaaacaatagccatgcaaggtgaagaatgtcaccaactcagaaacccttcttcattgacgtgtccctcactcactctcctctcttcactataaatcgccactcttcgtgttctccacttcaccaactccttcaaacttattaacactttccttagttcaatatggggaagcccttcttcactctctctctttcttccctttgcttgctactcttgtcgagtgccaactcaacaacctcaacgcgttggaacccgaccaccgcgttgagtccgaaggtggtcttattgaaacatggaactctcaacaccctgagctgcaatacgccggtgtcactgtttccaaacgcaccctcaaccgcaacggcctccacttgccatcttactcaccttatcccccaaatgatcattgtcgttcaaggtgcgtaatattagtaagaagtatttatcagcttaacgtgataacaataatagtaatatgaaatatttattaatttttataattaatctctgctagaaaatttgattaatcatttttagtagaatttgtttttctcaac

SEQ ID NO: 5686 - DNA, 618 bp, Artificial
  Mutations within GlyA3B4 introduced by GmGlyA3B4_T03TALE nuclease
gttcatgtacggttgcagatataaacgaagcatagcttatgtatgaggtgtaacaaaattggaaacaatagccatgcaaggtgaagaatgtcaccaactcagaaacccttcttcattgacgtgtccctcactcactctcctctcttcactataaatcgccactcttcgtgttctccacttcaccaactccttcaaacttattaacactttccttagttcaatatggggaagcccttcttcactctctctctttcttccctttgcttgctactcttgtcgagtgcatgctttgctattacctccagcaaagtgccaactcaacaacctcaacgcgttggaacccgaccaccgcgttgagtccgaaggtggtcttattgaaacatggaactctcaacaccctgagctgcaatgcgccggtgtcactgtttccaaacgcaccctcaaccgcaacggcctccacttgccatcttactcaccttatccccaaatgatcattgtcgttcaaggtgcgtaatattagtaagaagtatttatcagcttaacgtgataacaatatagtaatatgaaatatttattaaatttttataattaatctctgctagaaaatttgattaatca

SEQ ID NO: 5687 - DNA, 662 bp, Artificial
  Mutations within GlyA3B4 introduced by GmGlyA3B4_T03TALE nuclease
gttcatgtacggttgcagatataaacgaagcatagcttatgtatgaggtgtaacaaaattggaaacaatagccatgcaaggtgaagaatgtcaccaactcagaaacccttcttcattgacgtgtccctcactcactctcctctcttcactataaatcgccactcttcgtgttctccacttcaccaactccttcaaacttattaacactttccttagttcaatatggggaagcccttcttcactctctctctttcttccctttgcttgctactcttgtcgagtgcatgctttgctattacctccagcaagtgccaactcaacaacctcaacgcgttggaacccgaccaccgcgttgagtccgaaggtggtcttattgaaacatggaactctcaacaccctgagctgcaatgcgccggtgtcactgtttccaaacgcaccctcaaccgcaacggcctccacttgccatcttactcaccttatccccaaatgatcattgtcgttcaaggtgcgtaatattagtaagaagtatttatcagcttaacgtgataacaataatagtaatatgaaatatttattaaatttttataattaatctctgctagaaaatttgattaatcattttagtagaatttgtttttctcaactaggtttttaaaacacca

SEQ ID NO: 5688 - DNA, 646 bp, Artificial
  Mutations within GlyA3B4 introduced by GmGlyA3B4_T03TALE nuclease
gttcatgtacggttgcagatataaacgaagcatagcttatgtatgaggtgtaacaaaattggaaacaatagccatgcaaggtgaagaatgtcaccaactcagaaacccttcttcattgacgtgtccctcactcactctcctctcttcactataaatcgccactcttcgtgttctccacttcaccaactccttcaaacttattaacactttccttagttcaatatggggaagcccttcttcactctctctctttcttccctttgcttgctactcttgtcgagtgcatgctttgctattacctccagcaaagtgccaactcaacaacctcaacgcgttggaacccgaccaccgcgttgagtccgaaggtggtcttattgaacatggaactctcaacaccctgagctgcaatgcgccggtgtcactgtttccaaacgcaccctcaaccgcaacggcctccacttgccatcttactcaccttatccccaaatgatcattgtcgttcaaggtgcgtaatattagtaagaagtatttatcagcttaacgtgataacaatatagtaatatgaaatatttattaaatttttataattaatctctgctagaaaatttgattaatcattttagtagaatttgttttctcaactagg

SEQ ID NO: 5689 - DNA, 637 bp, Artificial
  Mutations within GlyA3B4 introduced by GmGlyA3B4_T03TALE nuclease
gttcatgtacggttgcagatataaacgaagcatagcttatgtatgaggtgtaacaaaattggaaacaatagccatgcaaggtgaagaatgtcaccaactcagaaaccccttcttcattgacgtgtccctcactcactctcctctcttcactataaatcgccactcttcgtgttctccacttcaccaactccttcaaacttattaacactttccttagttcaatatggggaagcccttcttcactctctctctttcttccctttgcttgctactcttgtcgagtgcatgctttgctattacctccagcaagttcagtgccaactcaacaacctcaacgcgttggaacccgaccaccgcgttgagtccgaaggtggtcttattgaaacatggaactctcaacaccctgagctgcaatgcgccggtgtcactgtttccaaacgcaccctcaccgcaacggcctccacttgccatcttactcaccttatccccaaatgatcattgtcgttcaaggtgcgtaatattagtaagaagtatttatcagcttaacgtgataacaatatagtaatatgaaatatttattaaatttttataattaatctctgctagaaaatttgattaatcattttagtagaatttg

SEQ ID NO: 5690 - DNA, 660 bp, Artificial; identical to SEQ ID NO: 4874
  Mutations within GlyA3B4 introduced by GmGlyA3B4_T03TALE nuclease

SEQ ID NO: 5691 - DNA, 621 bp, Artificial
  Mutations within GlyA3B4 introduced by GmGlyA3B4_T03TALE nuclease
  misc_feature (272): n is a or c or t or g
gttcatgtacggttgcagatataaacgaagcatagcttatgtatgaggtgtaacaaaattggaaacaatagccatgcaaggtgaagaatgtcaccaactcagaaaccccttcttcattgacgtgtccctcactcactctcctctcttcagctataaatcgccactcttcgtgttctccacttcaccaactccttcaaacttattaacactttccttagttcaatatggggaagcccttcttcactctctctctttcttccctttgcttgctnctcttgtcgagtgcatgctttgctattacctccagcaagtgtgccaactcaacaacctcaacgcgtggaacccgaccaccgcgttgagtccgaaggtggtcttattgaaacatggaactctcaacaccctgagctgcaatgcgccggtgtcactgtttccaaacgcaccctcaaccgcaacggcctccacttgccatcttactcaccttatccccaaatgatcattgtcgttcaaggtgcgtaatattagtaagaagtatttatcagcttaacgtgataacaataatagtaatatgaaatatttattaaatttttataattaatctctgctagaaaatttgattaatca

SEQ ID NO: 5692 - DNA, 667 bp, Artificial
  Mutations within GlyA3B4 introduced by GmGlyA3B4_T03TALE nuclease
gttcatgtacggttgcagatataaacgaagcatagcttatgtatgaggtgtaacaaaattggaaacaatagcccatgcaaggtgaagaatgtcaccaactcagaaacccttcttcattgacgtgtccctcactcactctcctctcttcactataaatcgccactcttcgtgttctccacttcaccaactccttcaaacttattaacactttccttagttcaatatggggaagcccttcttcactctctctctttcttccctttgcttgctactcttgtcgagtgcatgctttgctattacctccagcaagttcaagtgccaactcaacaacctcaacgcgttggaacccgaccaccgcgttgagtccgaaggtggtcttattgaaacatggaactctcaacaccctgagctgcaatgcgccggtgtcactgtttccaaacgcaccctcaaccgcaacggcctccacttgccatcttactcaccttatccccaaatgatcattgtcgttcaaggtgcgtaatattagtaagaagtatttatcagcttaacgtgatacaatatagtaatatgaaatatttattaaatttttataattaatctctgctagaaaatttgattaatcattttagtagaatttgtttttctcaactaggtttttaaaacacca

SEQ ID NO: 5693 - DNA, 647 bp, Artificial
  Mutations within GlyA3B4 introduced by GmGlyA3B4_T03TALE nuclease
gttcatgtacggttgcagatataaacgaagcatagcttatgtatgaggtgtaacaaaattggaaacaatagccatgcaaggtgaagaatgtcaccaactcagaaacccttcttcattgacgtgtccctcactcactctcctctcttcactataaatcgccactcttcgtgttctccacttcaccaactccttcaaacttattaacactttccttagttcaatatggggaagcccttcttcactctctctctttcttccctttgcttgctactcttgtcgagtgcatgctttgccaactcaacaacctcaacgcgttggaacccgaccaccgcgttgagtccgaaggtggtcttattgaaacatggaactctcaacacccctgagctgcaatgcgccggtgtcactgtttccaaacgcaccctcaaccgcaacggcctccacttgccatcttactcaccttatccccaaatgatcattgtcgttcaaggtgcgtaatattagtaagaagtatttatcagcttaacgtgataacaataatagtaatatgaaatatttattaaattttttataattaatctctgctagaaaatttgattaatcatttttagtagaatttgttttttctcaactaggttttaaacaccaca

SEQ ID NO: 5694 - DNA, 524 bp, Artificial
  Mutations within GlyA3B4 introduced by GmGlyA3B4_T03TALE nuclease
gttcatgtacggttgcagatataaacgaagcatagcttatgtatgaggtgtaacaaaattggaaacaatagccatgcaaggtgaagaatgtcaccaactcagaaacccttcttcattgacgtgtccctcactcactctcctctcttcactataaatcgccactcttcgtgttctccacttcaccaactccttcaaacttattaacactttccttagttcaatatggggaagcccttcttcactctctctctttcttccctttgcttgctactcttgtcgagtgcatgctttgctattacctccagcaagttcaacaccctgagctgcaatgcgccggtgtcactgtttccaaacgcaccctcaaccgcaacggcctccacttgccatcttactcaccttatccccaaatgatcattgtcgttcaaggtgcgtaatattagtaagaagtatttatcagcttaacgtgataacaataatagtaatatgaaatatttattaaattttttataattaatctctgctag

SEQ ID NO: 5695 - DNA, 552 bp, Artificial; identical to SEQ ID NO: 4807
  Mutations within GlyA3B4 introduced by GmGlyA3B4_T03TALE nuclease

SEQ ID NO: 5696 - DNA, 551 bp, Artificial
  Mutations within GlyA3B4 introduced by GmGlyA3B4_T03TALE nuclease
gttcatgtacggttgcagatataaacgaagcatagcttatgtatgaggtgtaacaaaattggaaacaatagccatgcaaggtgaagaatgtcaccaactcagaaacccttcttcattgacgtgtccctcactcactctcctctcttcactataaatcgccactcttcgtgttctccacttcacctcactttcgatcgatgaccacccttcaacaacctcagcgcgttggaacccgaccaccgcgttgagtccgaaggtggtcttattgaaacatggaactctcaacaccctgagctgcaatgcgccggtgtcactgtttccaaacgcaccctcaaccgcaacggcctccacttgccatcttactcaccttatcccccaaatgatcattgtcgttcaaggtgcgtaatattagtaagaagtatttatcagcttaacgtgataacaataatagtaatatgaaatatttattaaattttttataattaatctctgctagaaaatttgattaatcatttttagtagaatttgtttttctcaactaggtttttaaa

SEQ ID NO: 5697 - DNA, 603 bp, Artificial
  Mutations within GlyA3B4 introduced by GmGlyA3B4_T03TALE nuclease
gttcatgtacggttgcagatataaacgaagcatagcttatgtatgaggtgtaacaaaattggaaacaatagccatgcaaggtgaagaatgtcaccaactcagaaacccttcttcattgacgtgtccctcactcactctcctctcttcactataaatcgccactcttcgtgttctccacttcaccaactccttcaaacttattaacactttccttagttcaatatggggaagcccttcttcactctctctctttcttccctttgcttgctactcttgtcgagtgccaactcaacaacctcaacgcgttggaacccgaccaccgcgttgagtccgaaggtggtcttattgaaacatggaactctcaacaccctgagctgcaatgcgccggtgtcactgtttccaaacgcaccctcaaccgcaacggcctccacttgccatcttactcaccttatccccaaatgatcattgtcgttcaaggtgcgtaatattagtaagaagtatttatcagcttaacgtgataacaataatagtaatatgaaatatttattaaattttttataattaatctctgctagaaaatttgattaatcatttttagtagaa

SEQ ID NO: 5698 - DNA, 647 bp, Artificial
  Mutations within GlyA3B4 introduced by GmGlyA3B4_T03TALE nuclease
gttcatgtacggttgcagatataaacgaagcatagcttatgtatgaggtgtaacaaaattggaaacaatagccatgcaaggtgaagaatgtcaccaactcagaaacccttcttcattgacgtgtccctcactcactctcctctcttcactataaatcgccactcttcgtgttctccacttcaccaactccttcaaacttattaacactttccttagttcaatatggggaagcccttcttcactctctctctttcttccctttgcttgctactcttgtcgagtgcatgctttgctattacctccagcaagttaagtgccaactcaacaacctcaacgcgttggaacccgaccaccgcgttgagtccgaaggtggtcttattgaaacatggaactctcaacaccctgagctgcaatgcgccggtgtcactgtttccaaacgcaccctcaaccgcaacggcctccacttgccatcttactcaccttatccccaaatgatcattgtcgttcaaggtgcgtaatattagtaagaagtatttatcagcttaacgtgataacaataatagtaatatgaaatatttattaaatttttataattaatctctgctagaaaatttgattaatcattttagtagaatttgttttctcaa

SEQ ID NO: 5699 - DNA, 662 bp, Artificial; identical to SEQ ID NO: 4805
  Mutations within GlyA3B4 introduced by GmGlyA3B4_T03TALE nuclease

SEQ ID NO: 5700 - DNA, 655 bp, Artificial
  Mutations within GlyA3B4 introduced by GmGlyA3B4_T03TALE nuclease
gttcatgtacggttgcagatataaacgaagcatagcttatgtatgaggtgtaacaaaattggaaacaatagccatgcaaggtgaagaatgtcaccaactcagaaaccccttcttcattgacgtgtccctcactcactctcctctcttcactataaatcgccactcttcgtgttctccacttcaccaactccttcaaacttattaacactttccttagttcaatatggggaagcccttcttgcactctctctctttcttccctttgcttgctactcttgtcgagtgcatgctttgctattacctccagcaagttcaagtgccaactcaacaacctcaacgcgttggaacccgaccaccgcgttgagtccgaaggtggtcttattgaaacatggaactctcaacaccctgagctgcaatgcgccggtgtcactgtttccaaacgcaccctcaaccgcaacggcctccacttgccatcttactcaccttatccccaaatgatcattgtcgttcaaggtgcgtaatattagtaagaagtatttatcagcttaacgtgataacaataatagtaatatgaaatatttattaaatttttataattaatctctgctagaaaatttgattaatcattttagtagaatttgttttctcaactagg

SEQ ID NO: 5701 - DNA, 632 bp, Artificial; identical to SEQ ID NO: 5262
  Mutations within GlyA3B4 introduced by GmGlyA3B4_T03TALE nuclease

SEQ ID NO: 5702 - DNA, 622 bp, Artificial; identical to SEQ ID NO: 5263
  Mutations within GlyA3B4 introduced by GmGlyA3B4_T03TALE nuclease

SEQ ID NO: 5703 - DNA, 648 bp, Artificial; identical to SEQ ID NO: 5364
  Mutations within GlyA3B4 introduced by GmGlyA3B4_T03TALE nuclease

SEQ ID NO: 5704 - DNA, 619 bp, Artificial
  Mutations within GlyA3B4 introduced by GmGlyA3B4_T03TALE nuclease
gttcatgtacggttgcagatataaacgaagcatagcttatgtatgaggtgtaacaaaattggaaacaatagccatgcaaggtgaagaatgtcaccaactcagaaacccttcttcattgacgtgtccctcactcactctcctctcttcactataaatcgccactcttcgtgttctccacttcaccaactccttcaaacttattaacactttccttagttcaatatggggaagcccttcttcactctctctctttcttccctttgcttgctactcttgtcgagtgcatgctttgctattacctccagcaagtgccaactcaacaacctcaacgcgttggaacccgaccaccgcgttgagtccgaaggtggtcttattgaaacatggaactctcaacaccctgagctgcaatgcgccggtgtcactgtttccaaacgcaccctcaaccgcaacggcctccacttgccatcttactcaccttatccccaaatgatcattgtcgttcaaggtgcgtaatattagtaagaagtatttatcagcttaacgtgataacaataatagtaatatgaaaatatttattaaatttttataattaatctctgctagaaaatttgattaatca

SEQ ID NO: 5705 - DNA, 498 bp, Artificial
  Mutations within GlyA3B4 introduced by GmGlyA3B4_T03TALE nuclease
gttcatgtacggttgcagatataaacgaagcatagcttatgtatgaggtgtaacaaaattggaaacaatagccatgcaaggtgaagaatgtcaccaactcagaaacccttcttcattgacgtgtccctcactcactctcctctcttcactataaatcgccactcttcgtgttctccacttcaccaactccttcaaacttattaacactttccttagttcaacaccctgagctgcaatgcgccggtgtcactgtttccaaacgcaccctcaaccgcaacggcctccacttgccatcttactcaccttatccccaaatgatcattgtcgttcaaggtgcgtaatattagtaaagaagtatttatcagcttaacgtgataacaataatagtaaatatgaaaatattttattaaaatttttttataattaatctctgctagaaaatttgattaatcatttttagtagaatttgtttttctcaactaggttttaaacaccaca

SEQ ID NO: 5706 - DNA, 535 bp, Artificial
  Mutations within GlyA3B4 introduced by GmGlyA3B4_T03TALE nuclease
gttcatgtacggttgcagatataaacgaagcatagcttatgtatgaggtgtaacaaaattggaaacaatagccatgcaaggtgaagaatgtcaccaactcagaaacccttcttcattgacgtgtccctcactcactctcctctcttcactataaatcgccactcttcgtgttctccacttcaccaactccttcaaacttattaacactttccttagttcaatatggggaagcccttcttcactctctctctttcttccctttgcttgctactcttgtcgagtgccaactcaacaacctcacgcgttggaacccgaccaccgcgttgagtccgaaggtggtcttattgaacatggaactctcaacaccctgagctgcaatgcgccggtgtcactgtttccaaacgcaccctcaaccgcaacggcctccacttgccatcttactcaccttatccccaaatgatcattgtcgttcaaggtgcgtaatattagtaagaagtatttatcagcttaacgtgataacaataatagtaatatg

SEQ ID NO: 5707 - DNA, 659 bp, Artificial
  Mutations within GlyA3B4 introduced by GmGlyA3B4_T03TALE nuclease
gttcatgtacggttgcagatataaacgaagcatagcttatgtatgaggtgtaacaaaattggaaacaatagccatgcaaggtgaagaatgtcaccaactcagaaacccttcttcattgacgtgtccctcactcactctcctctcttcactataaatcgccactcttcgtgttctccacttcaccaactccttcaaacttattaacactttccttagttcaatatggggaagcccttcttcactctctctctttcttccctttgcttgctactcttgtcgagtgcatgctttgctattacctccagcaagttgagtgccaactcaacaacctcaacgcgttggaacccgaccaccgcgttgagtccgaaggtggtcttattgaaacatggaactctcaacaccctgagctgcaatgcgccggtgtcactgtttccaaacgcaccctcaaccgcaacggcctccacttgccatcttactcaccttatccccaaatgatcattgtcgttcaaggtgcgtaatattagtaagaagtatttatcagcttaacgtgataacaataatagtaatatgaaatatttattaaatttttataattaatctctgctagaaaatttgattaatcattttagtagaatttgttttctcaactagttttaaaa

SEQ ID NO: 5708 - DNA, 636 bp, Artificial
  Mutations within GlyA3B4 introduced by GmGlyA3B4_T03TALE nuclease
gttcatgtacggttgcagatataaacgaagcatagcttatgtatgaggtgtaacaaaattggaaacaatagccatgcaaggtgaagaatgtcaccaactcagaaacccttcttcattgacgtgtccctcactcactctcctctcttcactataaatcgccactcttcgtgttctccacttcaccaactccttcaaacttattaacactttccttagttcaatatggggaagcccttcttcactctctctctttcttccctttgcttgctactcttgtcgagtgcatgctttgccaactcaacaacctcaacgcgttggaacccgaccaccgcgttgagtccgaaggtggtcttattgaaacatggaactctcaacaccctgagctgcaatgcgccggtgtcactgtttccaaacgcaccctcaaccgcaacggcctccacttgccatcttactcaccttatccccaaatgatcattgtcgttcaaggtgcgtaatattagtaagaagtatttatcagcttaacgtgataacaataatagtaatatgaaatatttattaaattttttataattaatctctgctagaaaatttgattaatcatttttagtagaatttgttttttctcaactaggtttt

SEQ ID NO: 5709 - DNA, 647 bp, Artificial
  Mutations within GlyA3B4 introduced by GmGlyA3B4_T03TALE nuclease
gttcatgtacggttgcagatataaacgaagcatagcttatgtatgaggtgtaacaaaattggaaacaatagccatgcaaggtgaagaatgtcaccaactcagaaacccttcttcattgacgtgtccctcactcactctcctctcttcactataaatcgccactcttcgtgttctccacttcaccaactccttcaaacttattaacactttccttagttcaatatggggaagcccttcttcactctctctctttcttccctttgcttgctactcttgtcgagtgcatgctttgctattacctccagcaagttcgtgctggacaaacaacctcaacgcgttggaacccgaccaccgcgttgagtccgaaggtggtcttattgaaacatggaactctcaacaccctgagctgcaatgcgccggtgtcactgtttccaaacgcaccctcaaccgcaacggcctccacttgccatcttactcaccttatccccaaatgatcattgtcgttcaaggtgcgtaatattagtaagaagtatttatcagcttaacgtgataacaataatagtaatatgaaatatttattaaatttttataattaatctctgctagaaaatttgattaatcatttttagtagaatttgttttctcaa

SEQ ID NO: 5710 - DNA, 632 bp, Artificial
  Mutations within GlyA3B4 introduced by GmGlyA3B4_T03TALE nuclease
gttcatgtacggttgcagatataaacgaagcatagcttatgtatgaggtgtaacaaaattggaaacaatagccatgcaaggtgaagaatgtcaccaactcagaaacccttcttcattgacgtgtccctcactcactctcctctcttcactataaatcgccactcttcgtgttctccacttcaccaactccttcaaacttattaacactttccttagttcaatatggggaagcccttcttcactctctctctttcttccctttgcttgctactcttgtcgagtgcatgctttgctattacctccagcaatgccaactcaacaacctcaacgcgttggaacacgaccaccgcgttgagtccgaaggtggtcttattgaaacatggaactctcaacaccctgagctgcaatgcgccggtgtcactgtttccaaacgcaccctcaaccgcaacggcctccacttgccatcttactcaccttatccccaaatgatcattgtcgttcaaggtgcgtaatattagtaagaagtatttatcagcttaacgtgataacaataatagtaatatgaaatatttattaaatttttataattaatctctgctagaaaatttgattaatcattttagtagaatttg

SEQ ID NO: 5711 - DNA, 653 bp, Artificial
  Mutations within GlyA3B4 introduced by GmGlyA3B4_T03TALE nuclease
gttcatgtacggttgcagatataaacgaagcatagcttatgtatgaggtgtaacaaaattggaaacaatagccatgcaaggtgaagaatgtcaccaactcagaaacccttcttcattgacgtgtccctcactcactctcctctcttcactataaatcgccactcttcgtgttctccacttcaccaactccttcaaacttattaacactttccttagttcaatatggggaagcccttcttcactctctctctttcttccctttgcttgctactcttgtcgagtgcatgctttgctattacctccagcaagccaactcaacaacctcaacgcgttggaacccgaccaccgcgttgagtccgaaggtggtcttattgaaacatggaactctcaacaccctgagctgcaatgcgccggtgtcactgtttccaaacgcaccctcaaccgcaacggcctccacttgccatcttactcaccttatccccaaatgatcattgtcgttcaaggtgcgtaatattagtaagaagtatttatcagcttaacgtgataacaataatagtaatatgaaatatttattaaatttttataattaatctctgctagaaaatttgattaatcattttagtagaatttgttttctcaactaggttttaaaa

SEQ ID NO: 5712 - DNA, 580 bp, Artificial
  Mutations within GlyA3B4 introduced by GmGlyA3B4_T03TALE nuclease
gttcatgtacggttgcagatataaacgaagcatagcttatgtatgaggtgtaacaaaattggaaacaatagccatgcaaggtgaagaatgtcaccaactcagaaacccttcttcattgacgtgtccctcactcactctcctctcttcactataaatcgccactcttcgtgttctccacttcaccaactccttcaaacttattaacactttccttagttcaatatggggaagcccttcttcactctctctctttcttccctttgcttgctactcttgtcgagtgccaactcaacaacctcaacgcgttggaacccgaccaccgcgttgagtccgaaggtggtcttattgaaacatggaactctcaacaccctgagctgcaatgcgccggtgtcactgtttccaaaacgcaccctcaaccgcaacggcctccacttgccatcttactcaccttatccccaaatgatcattgtcgttcaaggtgcgtaatattagtaagaagtatttatcagcttaacgtgataacaataatagtaatatgaaatatttattaaattttttataattaatctctgctagaaaa

SEQ ID NO: 5713 - DNA, 640 bp, Artificial; identical to SEQ ID NO: 5018
  Mutations within GlyA3B4 introduced by GmGlyA3B4_T03TALE nuclease

SEQ ID NO: 5714 - DNA, 696 bp, Artificial
  Mutations within GlyA3B4 introduced by GmGlyA3B4_T03TALE nuclease
gttcatgtacggttgcagatataaacgaagcatagcttatgtatgaggtgtaacaaaattggaaacaatagccatgcaaggtgaagaatgtcaccaactcagaaacccttcttcattgacgtgtccctcactcactctcctctcttcactataaatcgccactcttcgtgttctccacttcaccaactccttcaaacttattaacactttccttagttcaatatggggaagcccttcttcactctctctctttcttccctttgcttgctactcttgtcgagtgcatgctttgctattacctccagcaagcccccgttcagcccgaccgctgcgccttatccggtaactatcgtcgagtgccaactcaacaacctcaacgcgttggaacccgaccaccgcgttgagtccgaaggtggtcttattgaaacatggaactctcaacaccctgagctgcaatgcgccggtgtcactgtttccaaacgcaccctcaaccgcaacggcctccacttgccatcttactcaccttatccccaaatgatcattgtcgttcaaggtgcgtaatattagtaatgaagtatttatcagcttaacgtgataacaataatagtaatatgaaatatttattaaattttttataaattaatctctgctagaaaatttgaattaatcatttttagtagaatttgtttttctcaa

SEQ ID NO: 5715 - DNA, 661 bp, Artificial
  Mutations within GlyA3B4 introduced by GmGlyA3B4_T03TALE nuclease
gttcatgtacggttgcagatataaacgaagcatagcttatgtatgaggtgtaacaaaattggaaacaatagccatgcaaggtgaagaatgtcaccaactcagaaacccttcttcattgacgtgtccctcactcactctcctctcttcactataaatcgccactcttcgtgttctccacttcaccaactccttcaaacttattaacactttccttagttcaatatggggaagcccttcttcactctctctctttcttccctttgcttgctactcttgtcgagtgcatgctttgctattacctccagcaagttcgagtgccaactcaacaacctcaacgcgttggaacccgaccaccgcgttgagtccgaaggtggtcttattgaaacatggaactctcaacaccctgagctgcaatgcgccggtgtcactgtttccaaacgcaccctcaaccgcaacggcctccacttgccatcttactcaccttatccccaaatgatcattgtcgttcaaggtgcgtaatattagtaagagtatttatcagcttaacgtgataacaataatagtaatatgaaatatttattaaatttttataattaatctctgctagaaaatttgattaatcattttagtagaatttgtttttctcaactaggttttaaaa

SEQ ID NO: 5716 - DNA, 602 bp, Artificial; identical to SEQ ID NO: 1938
  Mutations within GlyA3B4 introduced by GmGlyA3B4_T03TALE nuclease

SEQ ID NO: 5717 - DNA, 503 bp, Artificial
  Mutations within GlyA3B4 introduced by GmGlyA3B4_T03TALE nuclease
gttcatgtacggttgcagatataaacgaagcatagcttatgtatgaggtgtaacaaaattggaaacaatagccatgcaaggtgaagaatgtcaccaactcagaaacccttcttcattgacgtgtccctcactcactctcctctcttcactataaatcgccactcttcgtgttctccacttcaccaactccttcaaacttattaacactttccttagttcaatatgggggaagcccttcttcactctctctctttcttccctttgcttgctactcttgtcgagtgcatgctttgctattacctccagcaagttcaccttatccccaaatgatcattgtcgttcaaggtgcgtaatattagtaagaagtatttatcagcttaacgtgataacaataatagtaatatgaaatattattaaatttttataattaatctctgctagaaatttgattaatcatttttagtagaatttgtttttctcaactaggtttttaaacaccacta

SEQ ID NO: 5718 - DNA, 544 bp, Artificial
  Mutations within GlyA3B4 introduced by GmGlyA3B4_T03TALE nuclease
gttcatgtacggttgcagatataaacgaagcatagcttatgtatgaggtgtaacaaaattggaaacaatagccatgcaaggtgaagaatgtcaccaactcagaaacccttcttcattgacgtgtccctcactcactctcctctcttcactataaatcgccactcttcgtgttctccacttcaccaactccttcaaacttattaacactttccttagttcaatatggggaagcccttcttcactctctctctttcttccctttgcttgctctcaacaccctgagctgcaatgcgccggtgtcactgtttccaaacgcaccctcaaccgcaacggcctccacttgccatcttactcaccttatccccaaatgatcattgtcgttcaaggtgcgtaatattagtaagaagtattttatcagcttaacgtgataacaataatagtaatatgaaatatttattaaattttttataattaatctctgctagaaaatttgattaatcatttttagtagaatttgtttttctcaactaggtttttaaacacc

SEQ ID NO: 5719 - DNA, 650 bp, Artificial
  Mutations within GlyA3B4 introduced by GmGlyA3B4_T03TALE nuclease
gttcatgtacggttgcagatataaacgaagcatagcttatgtatgaggtgtaacaaaattggaaacaatagccatgcaaggtgaagaatgtcaccaactcagaaacccttcttcattgacgtgtccctcactcactctcctctcttcactataaatcgccactcttcgtgttctccacttcaccaactccttcaaacttattaacactttccttagttcaatatggggaagcccttcttcactctctctctttcttccctttgcttgctactcttgtcgagtgcatgctttgctattacctccagcaacgagtgccaactcaacaacctcaacgcgttggaacccgaccaccgcgttgagtccgaaggtggtcttattgaaacatggaactctcaacaccctgagctgcaatgcgccggtgtcactgtttccaaacgcaccctcaaccgcaacggcctccacttgccatcttactcaccttatccccaaatgatcattgtcgttcaaggtgcgtaatattagtaagaagtatttatcagcttaacgtgataacaatatagtaatatgaaatatttattaaatttttataattaatctctgctagaaaatttgattaatcattttagtagaatttgtttttctcaactagg

SEQ ID NO: 5720 - DNA, 634 bp, Artificial
  Mutations within GlyA3B4 introduced by GmGlyA3B4_T03TALE nuclease
gttcatgtacggttgcagatataaacgaagcatagcttatgtatgaggtgtaacaaaattggaaacaatagccatgcaaggtgaagaatgtcaccaactcagaaacccttcttcattgacgtgtccctcactcactctcctctcttcactataaatcgccactcttcgtgttctccacttcaccaactccttcaaacttattaacactttccttagttcaatatggggaagcccttcttcactctctctctttcttccctttgcttgctactcttgtcgagtgcatgctttgctattacctccagctagtgccaactcaacaacctcaacgcgttggaacccgaccaccgcgttgagtccgaaggtggtcttattgaaacatggaactctcaacaccctgagctgcaatgcgccggtgtcactgtttccaaacgcaccctcaaccgcaacggcctccacttgccatcttactcaccttatccccaaatgatcattgtcgttcaaaggtgcgtaatattagtaagaagtatttatcagcttaacgtgataacaataatagtaatatgaaatatttattaaatttttataattaatctctgctagaaaatttgattaatcattttagtagaatttg

SEQ ID NO: 5721 - DNA, 641 bp, Artificial
  Mutations within GlyA3B4 introduced by GmGlyA3B4_T03TALE nuclease
gttcatgtacggttgcagatataaacgaagcatagcttatgtatgaggtgtaacaaaattggaaacaatagccatgcaaggtgaagaatgtcaccaactcagaaacccttcttcattgacgtgtccctcactcactctcctctcttcactataaatcgccactcttcgtgttctccacttcaccaactccttcaaacttattaacactttccttagttcaatatggggaagcccttcttcactctctctctttcttccctttgcttgctactcttgtcgagtgcatgctttgctattacctccagcaacctcaacgcgttggaacccgaccaccgcgttgagtccgaaggtggtcttattgaaacatggaactctcaacaccctgagctgcaatgcgccggtgtcactgtttccaaacgcaccctcaaccgcaacggcctccacttgccatcttactcaccttatccccaaatgatcattgtcgttcaaggtgcgtaaatattagtaagaagtatttatcagcttaacgtgataacaataatagtaatatgaaatatttattaaattttttataattaatctctgctagaaaatttgattaatcatttttagtagaatttgttttttctcaactaggtttt

SEQ ID NO: 5722 - DNA, 633 bp, Artificial; identical to SEQ ID NO: 5539
  Mutations within GlyA3B4 introduced by GmGlyA3B4_T03TALE nuclease

SEQ ID NO: 5723 - DNA, 656 bp, Artificial; identical to SEQ ID NO: 5165
  Mutations within GlyA3B4 introduced by GmGlyA3B4_T03TALE nuclease

SEQ ID NO: 5724 - DNA, 636 bp, Artificial
  Mutations within GlyA3B4 introduced by GmGlyA3B4_T03TALE nuclease
gttcatgtacggttgcagatataaacgaagcatagcttatgtatgaggtgtaacaaaattggaaacaatagccatgcaaggtgaagaatgtcaccaactcagaaacccttcttcattgacgtgtccctcactcactctcctctcttcactataaatcgccactcttcgtgttctccacttcaccaactccttcaaacttattaacactttccttagttcaatatggggaagcccttcttcactctctctctttcttccctttgcttgctactcttgtcgagtgcatgctttgctattacctccagcaaaacgtgccaactcaacaacctcaacgcgttggaacccgaccaccgcgttgagtccgaaggtggtcttattgaaacatggaactctcaacaccctgagctgcaatgcgccggtgtcactgtttccaaacgcaccctcaaccgcaacggcctccacttgccatcttactcaccttatccccaaatgatcattgtcgttcaaggtgcgtaatattagtaagaagtatttatcagcttaacgtgataacaataatagtaatatgaaatatttattaaatttttataattaatctctgctagaaaatttgattaatcattttagtagaatttg

SEQ ID NO: 5725 - DNA, 618 bp, Artificial; identical to SEQ ID NO: 4827
  Mutations within GlyA3B4 introduced by GmGlyA3B4_T03TALE nuclease

SEQ ID NO: 5726 - DNA, 776 bp, Artificial
  Mutations within GlyA3B4 introduced by GmGlyA3B4_T03TALE nuclease
  misc_feature (631): n is a or c or t or g
gttcatgtacggttgcagatataaacgaagcatagcttatgtatgaggtgtaacaaaattggaaacaatagccatgcaaggtgaagaatgtcaccaactcagaaacccttcttcattgacgtgtccctcactcactctcctctcttcactataaatcgccactcttcgtgttctccacttcaccaactccttcaaacttattaacactttccttagttcaatatggggaagcccttcttcactctctctctttcttccctttgcttgctactcttgtcgagtgcatgctttgctattacctccagcaagttcaacgccgccacgttttgcaatcttaagaagttggcctgtgtccaactgtaacggtggaccgtctccagcgcctgcttgccaccaatattgctggcgatggccaccacctgctggggggtcaagccgtgggcctggcacagcaccggcaacagcccctgcaccgtctgtgccaactcaacaacctcaacgcgttggaacccgaccaccgcgttgagtccgaaggtggtcttattgaaacatggaactctcaacaccctgagctgcaatgcgccggtgtcactgttttcccaaacgcaccctcaaccgcaacgggcctccncttgccatcttactcaccttatccccaaatgatcattgtcgttcaaggtgcgtaatatttagtaagaagtatttatcagcttaacgtgatacaataatagtatagaaatattattaaatttttataattaatctctgctagaaaa

SEQ ID NO: 5727 - DNA, 620 bp, Artificial
  Mutations within GlyA3B4 introduced by GmGlyA3B4_T03TALE nuclease
gttcatgtacggttgcagatataaacgaagcatagcttatgtatgaggtgtaacaaaattggaaacaatagccatgcaaggtgaagaatgtcaccaactcagaaacccttcttcattgacgtgtccctcactcactctcctctcttcactataaatcgccactcttcgtgttctccacttcaccaactccttcaaacttattaacactttccttagttcaatatggggaagcccttcttcactctctctctttcttccctttgcttgctactcttgtcgagtgcatgctttgctattacctccagcaagtgtgccaactcaacaacctcaacgcgttggaacccgaccaccgcgttgagtccgaaggtggtcttattgaaacatggaactctcaacaccctgagctgcaatgcgccggtgtcactgtttccaaacgcaccctcaaccgcaacggcctccacttgccatcttactcaccttatccccaaatgatcattgtcgttcaaggtgcgtaatattagtaagaagtatttatcagcttaacgtgataacaataatagtaatatgaaatatttattaaatttttataattaatctctgctagaaaatttgattaatca

SEQ ID NO: 5728 - DNA, 645 bp, Artificial; identical to SEQ ID NO: 5301
  Mutations within GlyA3B4 introduced by GmGlyA3B4_T03TALE nuclease

SEQ ID NO: 5729 - DNA, 653 bp, Artificial
  Mutations within GlyA3B4 introduced by GmGlyA3B4_T03TALE nuclease
gttcatgtacggttgcagatataaacgaagcatagcttatgtatgaggtgtaacaaaattggaaacaatagccatgcaaggtgaagaatgtcaccaactcagaaacccttcttcattgacgtgtccctcactcactctcctctcttcactataaatcgccactcttcgtgttctccacttcaccaactccttcaaacttattaacactttccttagttcaatatggggaagcccttcttcactctctctctttcttccctttgcttgctactcttgtcgagtgcatgctttgctattacctccagcaagtgtgccaactcaacaacctcaacgcgttggaacccgaccaccgcgttgagtccgaaggtggtcttattgaaacatggaactctcaacaccctgagctgcaatgcgccggtgtcactgtttccaaacgcaccctcaaccgcaacggcctccacttgccatcttactcaccttatccccaaatgatcattgtcgttcaaggtgcgtaatattagtaagaagtatttatcagcttaacgtgataacaataatagtaatatgaaatatttattaaatttttataattaatctctgctagaaaatttgattaatcattttagtagaatttgttttctcaactaggtttt

SEQ ID NO: 5730 - DNA, 646 bp, Artificial; identical to SEQ ID NO: 4907
  Mutations within GlyA3B4 introduced by GmGlyA3B4_T03TALE nuclease

SEQ ID NO: 5731 - DNA, 668 bp, Artificial
  Mutations within GlyA3B4 introduced by GmGlyA3B4_T03TALE nuclease
gttcatgtacggttgcagatataaacgaagcatagcttatgtatgaggtgtaacaaaattggaaacaatagccatgcaaggtgaagaatgtcaccaactcagaaaccccttcttcattgacgtgtccctcactcactctcctctcttcactataaatcgccactcttcgtgttctccacttcaccaactccttcaaacttattaacatcctttcctagttcaatatggggaagcccttcttcactctctctctttcttccctttgcttgctactcttgtcgagtgcatgctttgctattacctccagcaagttgagtgccaactcaacaacctcaacgcgttggaacccgaccaccgcgttgagtccgaaggtggtcttattgaaacatggaactctcaacaccctgagctgcaatgcgccggtgtcactgtttccaaacgcaccctcaaccgcaacggcctccacttgccatcttactcaccttatccccaaatgatcattgtcgttcaaggtgcgtaatattagtaagaagtatttatcagcttaacgtgataacaataatagtaatatgaaatatttattaaaatttttataattaatctctgctagaaaatttgattaatcattttagtagaatttgttttctcaactaggttttaaaacacca

SEQ ID NO: 5732 - DNA, 665 bp, Artificial
  Mutations within GlyA3B4 introduced by GmGlyA3B4_T03TALE nuclease
gttcatgtacggttgcagatataaacgaagcatagcttatgtatgaggtgtaacaaaattggaaacaatagccatgcaaggtgaagaatgtcaccaactcagaaacccttcttcattgacgtgtccctcactcactctcctctcttcactataaatcgccactcttcgtgttctccacttcaccaactccttcaaacttattaacactttccttagttcaatatggggaagcccttcttcactctctctctttcttccctttgcttgctactcttgtcgagtgcatgctttgctattacctccagctagtgccaactcaacaacctcaacgcgttggaacccgaccaccgcgttgagtccgaaggtggtcttattgaaacatggaactctcaacaccctgagctgcaatgcgccggtgtcactgtttccaaaacgcaccctcaaccgcaacggcctccacttgccatcttactcaccttatccccaaatgatcattgtcgttcaaggtgcgtaatattagtaagaagtatttatcagcttaacgtgataacaataatagtaatatgaaaatatttattaaaatttttataaattaatctctgctagaaaatttgattaatcattttagtagaatttgtttttctcaactaggttttaaaacacca

SEQ ID NO: 5733 - DNA, 645 bp, Artificial
  Mutations within GlyA3B4 introduced by GmGlyA3B4_T03TALE nuclease
gttcatgtacggttgcagatataaacgaagcatagcttatgtatgaggtgtaacaaaattggaaacaatagccatgcaaggtgaagaatgtcaccaactcagaaacccttcttcattgacgtgtccctcactcactctcctctcttcactataaatcgccactcttcgtgttctccacttcaccaactccttcaaacttattaacactttccttagttcaatatggggaagcccttcttcactctctctctttcttccctttgcttgctactcttgtcgagtgcatgctttgctattacctccagcaaacaacctcaacgcgttggaacccgaccaccgcgttgagtccgaaggtggtcttattgaaacatggaactctcaacaccctgagctgcaatgcgccggtgtcactgtttccaaacgcaccctcaaccgcaacggcctccacttgccatcttactcaccttatccccaaatgatcattgtcgttcaaggtgcgtaaatattagtaagaagtatttatcagcttaacgtgataacaataatagtaatatgaaatatttattaaattttttataattaatctctgctagaaaatttgattaatcatttttagtagaatttgttttttctcaactaggtttt

SEQ ID NO: 5734 - DNA, 623 bp, Artificial; identical to SEQ ID NO: 4845
  Mutations within GlyA3B4 introduced by GmGlyA3B4_T03TALE nuclease

SEQ ID NO: 5735 - DNA, 644 bp, Artificial
  Mutations within GlyA3B4 introduced by GmGlyA3B4_T03TALE nuclease
gttcatgtacggttgcagatataaacgaagcatagcttatgtatgaggtgtaacaaaattggaaacaatagccatgcaaggtgaagaatgtcaccaactcagaaacccttcttcattgacgtgtccctcactcactctcctctcttcactataaatcgccactcttcgtgttctccacttcaccaactccttcaaacttattaacactttccttagttcaatatggggaagcccttcttcactctctctctttcttccctttgcttgctactcttgtcgagtgcatgctttgctattacctccagcaagttgtgccaactcaacaacctcaacgcgttggaacccgaccaccgcgttgagtccgaaggtggtcttattgaaacatggaactctcaacaccctgagctgcaatgcgccggtgtcactgtttccaaacgcaccctcaaccgcaacggcctccacttgccatcttactcaccttatccccaaatgatcattgtcgttcaaggtgcgtaatattagtaagaagtatttatcagcttaacgtgataacaatatagtaatatgaaatatttattaaatttttataattaatctctgctagaaaatttgattaatcattttagtagaatttgttttctcaa

SEQ ID NO: 5736 - DNA, 662 bp, Artificial
  Mutations within GlyA3B4 introduced by GmGlyA3B4_T03TALE nuclease
gttcatgtacggttgcagatataaacgaagcatagcttatgtatgaggtgtaacaaaattggaaacaatagccatgcaaggtgaagaatgtcaccaactcagaaacccttcttcattgacgtgtccctcactcactctcctctcttcactataaatcgccactcttcgtgttctccacttcaccaactccttcaaacttattaacactttccttagttcaatatggggaagcccttcttcactctctctctttcttccctttgcttgctactcttgtcgagtgcatgctttgctattacctccagcaagtagtgccaactcaacaacctcaacgcgttggaacccgaccaccgcgttgagtccgaaggtggtcttattgaaacatggaactctcaacaccctgagctgcaatgcgccggtgtcactgtttccaaacgcaccctcaaccgcaacggcctccacttgccatcttactcaccttatccccaaatgatcattgtcgttcaaggtgcgtaatattagtaagaagtatttatcagcttaacgtgataacaatatagtaatatgaaatatttattaaatttttataattaatctctgctagaaaatttgattaatcattttagtagaatttgttttctcaactaggttttaaaacacca

SEQ ID NO: 5737 - DNA, 648 bp, Artificial
  Mutations within GlyA3B4 introduced by GmGlyA3B4_T03TALE nuclease
gttcatgtacggttgcagatataaacgaagcatagcttatgtatgaggtgtaacaaaattggaaacaatagccatgcaaggtgaagaatgtcaccaactcagaaacccttcttcattgacgtgtccctcactcactctcctctcttcactataaatcgccactcttcgtgttctccacttcaccaactccttcaaacttattaacactttccttagttcaatatggggaagcccttcttcactctctctctttcttccctttgcttgctactcttgtcgagtgcatgctttgctattacctccagcaaagtgccaactcaacaacctcaacgcgttggaacccgaccaccgcgttgagtccgaaggtggtcttattgaaacatggaactctcaacaccctgagctgcaatgcgccggtgtcactgtttccaaacgcaccctcaaccgcaacggcctccacttgccatcttactcaccttatccccaaatgatcattgtcgttcaaggtgcgtaatattagtaagaagtatttatcagcttaacgtgataacaataatagtaatatgaaatatttattaaatttttataattaatctctgctagaaaatttgattaatcattttagtagaatttgttttctcaactagg

SEQ ID NO: 5738 - DNA, 615 bp, Artificial
  Mutations within GlyA3B4 introduced by GmGlyA3B4_T03TALE nuclease
gttcatgtacggttgcagatataaacgaagcatagcttatgtatgaggtgtaacaaaattggaaacaatagccatgcaaggtgaagaatgtcaccaactcagaaacccttcttcattgacgtgtccctcactcactctcctctcttcactataaatcgccactcttcgtgttctccacttcaccaactccttcaaacttattaacactttccttagttcaatatggggaagcccttcttcactctctctctttcttccctttgcttgctactcttgtcgagtgcatgctttgctattacctccagcaagttcaactcaacaacctcaacgcgttggaacccgaccaccgcgttgagtccgaaggtggtcttattgaacatggaactctcaacaccctgagctgcaatgcgccggtgtcactgtttccaaacgcaccctcaaccgcaacggcctccacttgccatcttactcaccttatccccaaatgatcattgtcgttcaaggtgcgtaatattagtaagaagtatttatcagcttaacgtgataacaatatagtaatatgaaatatttattaaatttttataattaatctctgctagaaaatttgattaatca

SEQ ID NO: 5739 - DNA, 638 bp, Artificial; identical to SEQ ID NO: 5089
  Mutations within GlyA3B4 introduced by GmGlyA3B4_T03TALE nuclease

SEQ ID NO: 5740 - DNA, 656 bp, Artificial
  Mutations within GlyA3B4 introduced by GmGlyA3B4_T03TALE nuclease
gttcatgtacggttgcagatataaacgaagcatagcttatgtatgaggtgtaacaaaaattggaaacaatagccatgcaaggtgaagaatgtcaccaactcagaaacccttcttcattgacgtgtccctcactcactctcctctcttcactataaatcgccactcttcgtgttctccacttcaccaactccttcaaacttattaacactttccttagttcaatatggggaagcccttcttcactctctctctttcttccctttgcttgctactcttgtcgagtgcatgctttgctattacctccagcaagtgccaactcaacaacctcaacgcgttggaacccgaccaccgcgttgagtccgaaggtggtcttattgaaacatggaactctcaacaccctgagctgcaatgcgccggtgtcactgtttccaaacgcaccctcaaccgcaacggcctccacttgccatcttactcaccttatccccaaatgatcattgtcgttcaaggtgcgtaatattagtaagaagtatttatcagcttaacgtgataacaataatagtaatatgaaatatttattaaatttttataattaatctctgctagaaaatttgattaatcattttagtagaatttgttttctcaactaggttttaaaa

SEQ ID NO: 5741 - DNA, 651 bp, Artificial; identical to SEQ ID NO: 5267
  Mutations within GlyA3B4 introduced by GmGlyA3B4_T03TALE nuclease

SEQ ID NO: 5742 - DNA, 650 bp, Artificial
  Mutations within GlyA3B4 introduced by GmGlyA3B4_T03TALE nuclease
gttcatgtacggttgcagatataaacgaagcatagcttatgtatgaggtgtaacaaaattggaaacaatagccatgcaaggtgaagaatgtcaccaactcagaaacccttcttcattgacgtgtccctcactcactctcctctcttcactataaatcgccactcttcgtgttctccacttcaccaactccttcaaacttattaacactttccttagttcaatatggggaagcccttcttcactctctctctttcttccctttgcttgctactcttgtcgagtgcatgctttgctattacctccagcaagttggaacccgaccaccgcgttggaacccgaccaccgcgttgagtccgaaggtggtcttattgaaacatggaactctcaacaccctgagctgcaatgcgccggtgtcactgtttccaaacgcaccctcaaccgcaacggcctccacttgccatcttactcaccttatccccaaatgatcattgtcgttcaaggtgcgtaatattagtaagaagtatttatcagcttaacgtgataacaataatagtaatatgaaatatttattaaattttttataattaatctctgctagaaaatttgattaatcatttttagtagaatttgttttttctcaactaggtttt

SEQ ID NO: 5743 - DNA, 656 bp, Artificial
  Mutations within GlyA3B4 introduced by GmGlyA3B4_T03TALE nuclease
gttcatgtacggttgcagatataaacgaagcatagcttatgtatgaggtgtaacaaaattggaaacaatagccatgcaaggtgaagaatgtcaccaactcagaaacccttcttcattgacgtgtccctcactcactctcctctcttcactataaatcgccactcttcgtgttctccacttcaccaactccttcaaacttattaacactttccttagttcaatatggggaagcccttcttcactctctctctttcttccctttgcttgctactcttgtcgagtgcatgctttgctattacctccagcaaacgagtgccaactcaacaacctcaacgcgttggaacccgaccaccgcgttgagtccgaaggtggtcttattgaaacatggaactctcaacaccctgagctgcaatgcgccggtgtcactgtttccaaacgcaccctcaaccgcaacggcctccacttgccatcttactcaccttatccccaaatgatcattgtcgttcaaggtgcgtaatattagtaagaagtatttatcagcttaacgtgataacaataatagtaatatgaaatatttattaaatttttataattaatctctgctagaaaatttgattaatcattttagtagaatttgtttttctcaactaggtttt

SEQ ID NO: 5744 - DNA, 657 bp, Artificial
  Mutations within GlyA3B4 introduced by GmGlyA3B4_T03TALE nuclease
gttcatgtacggttgcagatataaacgaagcatagcttatgtatgaggtgtaacaaaattggaaacaatagccatgcaaggtgaagaatgtcaccaactcagaaacccttcttcattgacgtgtccctcactcactctcctctcttcactataaatcgccactcttcgtgttctccacttcaccaactccttcaaacttattaacactttccttagttcaatatggggaagcccttcttcactctctctctttcttccctttgcttgctactcttgtcgagtgcatgctttgctattacctccagcagccaactcaacaacctcaacgcgttggaacccgaccaccgcgttgagtccgaaggtggtcttattgaaacatggaactctcaacaccctgagctgcaatgcgccggtgtcactgtttccaaacgcaccctcaaccgcaacggcctccacttgccatcttactcaccttatccccaaatgatcattgtcgttcaaggtgcgtaatattagtaagaagtatttatcagcttaacgtgataacaataatagtaatatgaaatatttattaaatttttataattaatctctgctagaaaatttgattaatcattttagtagaatttgttttctcaactaggttttaaaacacca

SEQ ID NO: 5745 - DNA, 662 bp, Artificial; identical to SEQ ID NO: 5534
  Mutations within GlyA3B4 introduced by GmGlyA3B4_T03TALE nuclease

SEQ ID NO: 5746 - DNA, 659 bp, Artificial
  Mutations within GlyA3B4 introduced by GmGlyA3B4_T03TALE nuclease
gttcatgtacggttgcagatataaacgaagcatagcttatgtatgaggtgtaacaaaattggaaacaatagccatgcaaggtgaagaatgtcaccaactcagaaacccttcttcattgacgtgtccctcactcactctcctctcttcactataaatcgccactcttcgtgttctccacttcaccaactccttcaaacttattaacactttccttagttcaatatggggaagcccttcttcactctctctctttcttccctttgcttgctactcttgtcgagtgcatgctttgctattacctccagcaagtagtgccaactcaacaacctcaacgcgttggaacccgaccaccgcgttgagtccgaaggtggtcttattgaaacatggaactctcaacaccctgagctgcaatgcgccggtgtcactgtttccaaacgcaccctcaaccgcaacggcctccacttgccatcttactcaccttatccccaaatgatcattgtcgttcaaggtgcgtaatattagtaagaagtatttatcagcttaacgtgataacaataatagtaatatgaaatatttattaaatttttataattaatctctgctagaaaatttgattaatcatttttagtagaatttgtttttctcaactaggttttaaa

SEQ ID NO: 5747 - DNA, 500 bp, Artificial
  Mutations within GlyA3B4 introduced by GmGlyA3B4_T03TALE nuclease
gttcatgtacggttgcagatataaacgaagcatagcttatgtatgaggtgtaacaaaattggaaacaatagccatgcaaggtgaagaatgtcaccaactcagaaacccttcttcattgacgtgtccctcactcactctcctctcttcactataaatcgccactcttcgtgttctccacttcaccgcgttgagtccgaaggtggtcttattgaaacatggaactctcaacaccctgagctgcaatgcgccggtgtcactgtttccaaacgcaccctcaaccgcaacggcctccacttgccatcttactcaccttatccccaaatgatcattgtcgttcaaggtgcgtaatattagtaagaagtatttatcagcttaacgtgataacaataatagtaatatgaaatattttattaaattttttataattaatctctgctagaaaatttgattaatcatttttagtagaatttgtttttctcaactaggttttaaacaccaca

SEQ ID NO: 5748 - DNA, 662 bp, Artificial
  Mutations within GlyA3B4 introduced by GmGlyA3B4_T03TALE nuclease
gttcatgtacggttgcagatataaacgaagcatagcttatgtatgaggtgtaacaaaattggaaacaatagccatgcaaggtgaagaatgtcaccaactcagaaacccttcttcattgacgtgtccctcacttactctcctctcttcactataaatcgccactcttcgtgttctccacttcaccaactccttcaaacttattaacactttccttagttcaatatggggaagcccttcttcactctctctctttcttccctttgcttgctactcttgtcgagtgcatgctttgctattacctccagcaagagtgccaactcaacaacctcaacgcgttggaacccgaccaccgcgttgagtccgaaggtggtcttattgaaacatggaactctcaacaccctgagctgcaatgcgccggtgtcactgtttccaaacgcaccctcaaccgcaacggcctccacttgccatcttactcaccttatccccaaatgatcattgtcgttcaaggtgcgtaatattagtaagaagtatttatcagcttaacgtgataacaataatagtaatatgaaatatttattaaatttttataattaatctctgctagaaaatttgattaatcattttagtagaatttgttttctcaactaggttttaaaacacca

SEQ ID NO: 5749 - DNA, 657 bp, Artificial
  Mutations within GlyA3B4 introduced by GmGlyA3B4_T03TALE nuclease
gttcatgtacggttgcagatataaacgaagcatagcttatgtatgaggtgtaacaaaattggaaacaatagccatgcaaggtgaagaatgtcaccaactcagaaacccttcttcattgacgtgtccctcactcactctcctctcttcactataaatcgccactcttcgtgttctccacttcaccaactccttcaaacttattaacactttccttagttcaatatggggaagcccttcttcactctctctctttcttccctttgcttgctactcttgtcgagtgcatgctttgctattacctccagcaagttcaacgcaacaacctcaacgcgttggaacccgaccaccgcgttgagtccgaaggtggtcttattgaacatggaactctcaacaccctgagctgcaatgcgccggtgtcactgtttccaaacgcaccctcaaccgcaacggcctccacttgccatcttactcaccttatccccaaatgatcattgtcgttcaaggtgcgtaatattagtaagaagtatttatcagcttaacgtgataacaataatagtaatatgaaatatttattaaatttttataatttaatctctgctagaaaatttgattaatcattttagtagaatttgtttttctcaacttaggtttttaaaa

SEQ ID NO: 5750 - DNA, 634 bp, Artificial
  Mutations within GlyA3B4 introduced by GmGlyA3B4_T03TALE nuclease
gttcatgtacggttgcagatataaacgaagcatagcttatgtatgaggtgtaacaaaattggaaacaatagccatgcaaggtgaagaatgtcaccaactcagaaaccccttcttcattgacgtgtccctcactcactctcctctcttcactataaatcgccactcttcgtgttctccacttcaccaactccttcaaacttattaacactttccttagttcaatatggggaagcccttcttcactctctctctttcttccctttgcttgctactcttgtcgagtgcatgctttgctattacctccagcaagtgccaactcaacaacctcaacgcgttggaacccgaccaccgcgttgagtccgaaggtggtcttattgaaacatggaactctcaacaccctgagctgcaatgcgccggtgtcactgtttccaaacgcaccctcaaccgcaacggcctccacttgccatcttactcaccttatcccccaaatgatcattgtcgttcaaggtgcgtaatattagtaagaagtatttatcagcttaacgtgataacaatatagtaatatgaaatatttattaaatttttataattaatctctgctagaaaatttgattaatcattttagtagaatttg

SEQ ID NO: 5751 - DNA, 654 bp, Artificial
  Mutations within GlyA3B4 introduced by GmGlyA3B4_T03TALE nuclease
gttcatgtacggttgcagatataaacgaagcatagcttatgtatgaggtgtaacaaaattggaaacaatagccatgcaaggtgaagaatgtcaccaactcagaaacccttcttcattgacgtgtccctcactcactctcctctcttcactataaatcgccactcttcgtgttctccacttcaccaactccttcaaacttattaacactttccttagttcaatatggggaagcccttcttcactctctctctttcttccctttgcttgctactcttgtcgagtgcatgctttgctattacctccagcaagttcaaagtgccaactcaacaacctcaacgcgttggaacccgaccaccgcgttgagtccgaaggtggtcttattgaaacatggaactctcaacaccctgagctgcaatgcgccggtgtcactgtttccaaacgcaccctcaaccgcaacggcctccacttgccatcttactcaccttatccccaaatgatcattgtcgttcaaggtgcgtaatattagtaagaagtatttatcagcttaacgtgataacaatatagtaatatgaaatatttattaaatttttataattaatctctgctagaaaatttgattaatcattttagtagaatttgtttttctcaactagg

SEQ ID NO: 5752 - DNA, 644 bp, Artificial; identical to SEQ ID NO: 5735
  Mutations within GlyA3B4 introduced by GmGlyA3B4_T03TALE nuclease

SEQ ID NO: 5753 - DNA, 661 bp, Artificial
  Mutations within GlyA3B4 introduced by GmGlyA3B4_T03TALE nuclease
gttcatgtacggttgcagatataaacgaagcatagcttatgtatgaggtgtaacaaaattggaaacaatagccatgcaaggtgaagaatgtcaccaactcagaaaccccttcttcattgacgtgtccctcactcactctcctctcttcactataaatcgccactcttcgtgttctccacttcaccaactccttcaaacttattaacactttccttagttcaatatggggaagcccttcttcactctctctctttcttccctttgcttgctactcttgtcgagtgcatgctttgctattacctccagcaagtgccaactcaacaacctcaacgcgttggaacccgaccaccgcgttgagtccgaaggtggtcttattgaaacatggaactctcaacaccctgagctgcaatgcgccggtgtcactgtttccaaacgcaccctcaaccgcaacggcctccacttgccatcttactcaccttatccccaaatgatcattgtcgttcaaggtgcgtaatattagtaagaagtatttatcagcttaacgtgataacaataatagtaatatgaaatatttattaaatttttataattaatctctgctagaaaatttgattaatcattttagtagaatttgttttctcaactaggttttaaaacacca

SEQ ID NO: 5754 - DNA, 621 bp, Artificial
  Mutations within GlyA3B4 introduced by GmGlyA3B4_T03TALE nuclease
gttcatgtacggttgcagatataaacgaagcatagcttatgtatgaggtgtaacaaaattggaaacaatagccatgcaaggtgaagaatgtcaccaactcagaaacccttcttcattgacgtgtccctcactcactctcctctcttcactataaatcgccactcttcgtgttctccacttcaccaactccttcaaacttattaacactttccttagttcaatatggggaagcccttcttcactctctctctttcttccctttgcttgctactcttgtcgagtgcatgctttgctattacctccagcaagttagtgccaactcaacaacctcaacgcgttggaacccgaccaccgcgttgagtccgaaggtggtcttattgaaacatggaactctcaacaccctgagctgcaatgcgccggtgtcactgtttccaaacgcaccctcaaccgcaacggcctccacttgccatcttactcaccttatccccaaatgatcattgtcgttcaaggtgcgtaatattagtaagaagtatttatcagcttaacgtgataacaatatagtaatatgaaatatttattaaatttttataattaatctctgctagaaaatttgattaatca

SEQ ID NO: 5755 - DNA, 642 bp, Artificial; identical to SEQ ID NO: 5205
  Mutations within GlyA3B4 introduced by GmGlyA3B4_T03TALE nuclease

SEQ ID NO: 5756 - DNA, 622 bp, Artificial; identical to SEQ ID NO: 5263
  Mutations within GlyA3B4 introduced by GmGlyA3B4_T03TALE nuclease

SEQ ID NO: 5757 - DNA, 644 bp, Artificial
  Mutations within GlyA3B4 introduced by GmGlyA3B4_T03TALE nuclease
gttcatgtacggttgcagatataaacgaagcatagcttatgtatgaggtgtaacaaaattggaaacaatagccatgcaaggtgaagaatgtcaccaactcagaaacccttcttcattgacgtgtccctcactcactctcctctcttcactataaatcgccactcttcgtgttctccacttcaccaactccttcaaacttattaacactttccttagttcaatatggggaagcccttcttcactctctctctttcttccctttgcttgctactcttgtcgagtgcatgctttgctattacctccagctagtgccaactcaacaacctcaacgcgttggaacccgaccaccgcgttgagtccgaaggtggtcttattgaaacatggaactctcaacaccctgagctgcaatgcgccggtgtcactgtttccaaacgcaccctcaaccgcaacggcctccacttgccatcttactcaccttatccccaaatgatcattgtcgttcaaggtgcgtaatattagtaagaagtatttatcagcttaacgtgataacaataatagtaatatgaaatatttattaaatttttataattaatctctgctagaaaatttgattaatcatttttagtagaatttgtttttctcaa

SEQ ID NO: 5758 - DNA, 645 bp, Artificial
  Mutations within GlyA3B4 introduced by GmGlyA3B4_T03TALE nuclease
gttcatgtacggttgcagatataaacgaagcatagcttatgtatgaggtgtaacaaaattggaaacaatagccatgcaaggtgaagaatgtcaccaactcagaaacccttcttcattgacgtgtccctcactcactctcctctcttcactataaatcgccactcttcgtgttctccacttcaccaactccttcaaacttattaacactttccttagttcaatatggggaagcccttcttcactctctctctttcttccctttgcttgctactcttgtcgagtgcatgctttgctattacctccagcaagttagtgccaactcaacaacctcaacgcgttggaacccgaccaccgcgttgagtccgaaggtggtcttattgaacatggaactctcaacaccctgagctgcaatgcgccggtgtcactgtttccaaacgcaccctcaaccgcaacggcctccacttgccatcttactcaccttatccccaaatgatcattgtcgttcaaggtgcgtaatattagtaagaagtatttatcagcttaacgtgataacaataatagtaatatgaaatatttattaaatttttataattaatctctgctagaaaatttgattaatcattttagtagaatttgttttctcaa

SEQ ID NO: 5759 - DNA, 659 bp, Artificial
  Mutations within GlyA3B4 introduced by GmGlyA3B4_T03TALE nuclease
gttcatgtacggttgcagatataaacgaagcatagcttatgtatgaggtgtaacaaaattggaaacaatagccatgcaaggtgaagaatgtcaccaactcagaaacccttcttcattgacgtgtccctcactcactctcctctcttcactataaatcgccactcttcgtgttctccacttcaccaactccttcaaacttattaacactttccttagttcaatatggggaagcccttcttcactctctctctttcttccctttgcttgctactcttgtcgagtgcatgctttgctattacctccagcaagttcgtgccaactcaacaacctcaacgcgttggaacccgaccaccgcgttgagtccgaaggtggtcttattgaaacatggaactctcaacaccctgagctgcaatgcgccggtgtcactgtttccaaacgcaccctcaaccgcaacggcctccacttgccatcttactcaccttatccccaaatgatcattgtcgttcaaggtgcgtaatattagtaagaagtatttatcagcttaacgtgataacaataatagtaatatgaaatatttattaaatttttataattaatctctgctagaaaatttgattaatcattttagtagaatttgttttctcaactaggttttaaaa

SEQ ID NO: 5760 - DNA, 619 bp, Artificial; identical to SEQ ID NO: 4921
  Mutations within GlyA3B4 introduced by GmGlyA3B4_T03TALE nuclease

SEQ ID NO: 5761 - DNA, 619 bp, Artificial
  Mutations within GlyA3B4 introduced by GmGlyA3B4_T03TALE nuclease
gttcatgtacggttgcagatataaacgaagcatagcttatgtatgaggtgtaacaaaattggaaacaatagccatgcaaggtgaagaatgtcaccaactcagaaacccttcttcattgacgtgtccctcactcactctcctctcttcactataaatcgccactcttcgtgttctccacttcaccaactccttcaaacttattaacactttccttagttcaatatggggaagcccttcttcactctctctctttcttccctttgcttgctactcttgtcgagtgcatgctttgctattacctccagcaagtgccaactcaacaacctcaacgcgttggaacccgaccaccgcgttgagtccgaaggtggtcttattgaaacatggaactctcaacaccctgagctgcaatgcgccggtgtcactgtttccaaacgcaccctcaaccgcaacggcctccacttgccatcttactcaccttatccccaaatgatcattgtcgttcaaggtgcgtaatattagtaagaagtatttatcagcttaacgtgataacaataatagtaatatgaaatatttattaaatttttataatttaatctctgctagaaaatttgattaatca

SEQ ID NO: 5762 - DNA, 600 bp, Artificial
  Mutations within GlyA3B4 introduced by GmGlyA3B4_T03TALE nuclease
gttcatgtacggttgcagatataaacgaagcatagcttatgtatgaggtgtaacaaaattggaaacaatagccatgcaaggtgaagaatgtcaccaactcagaaacccttcttcattgacgtgtccctcactcactctcctctcttcactataaatcgccactcttcgtgttctccacttcaccaactccttcaaacttattaacactttccttagttcaatatggggaagcccttcttcactctctctctttcttccctttgcttgctactcttgtcgagtgcatgctttgctattacctccagcgcgttgagtccgaaggtggtcttattgaaacatggaactctcaacaccctgagctgcaatgcgccggtgtcactgtttccaaacgcaccctcaaccgcaacggcctccacttgccatcttactcaccttatccccaaatgatcattgtcgttcaaggtgcgtaatattagtaagaagtatttatcagcttaacgtgataacaataatagtaatatgaaatatttattaatttttataattaatctctgctagaaatttgattaatcatttttagtagaatttgtttttctcaac

SEQ ID NO: 5763 - DNA, 646 bp, Artificial; identical to SEQ ID NO: 4907
  Mutations within GlyA3B4 introduced by GmGlyA3B4_T03TALE nuclease

SEQ ID NO: 5764 - DNA, 613 bp, Artificial
  Mutations within GlyA3B4 introduced by GmGlyA3B4_T03TALE nuclease
gttcatgtacggttgcagatataaacgaagcatagcttatgtatgaggtgtaacaaaattggaaacaatagccatgcaaggtgaagaatgtcaccaactcagaaacccttcttcattgacgtgtccctcactcactctcctctcttcactataaatcgccactcttcgtgttctccacttcaccaactccttcaaacttattaacactttccttagttcaatatggggaagcccttcttcactctctctctttcttccctttgcttgctactcttgtcgagtgccaactcaacaacctcaacgcgttggaacccgaccaccgcgttgagtccgaaggtggtcttattgaacatggaactctcaacaccctgagctgcaatgcgccggtgtcactgtttccaaacgcaccctcaaccgcaacggcctccacttgccatcttactcaccttatccccaaatgatcattgtcgttcaaggtgcgtaatattagtaagaagtatttatcgcttaacgtgatacaataatagtaatatgaatatttattaatttttataattaatctctgctacgaaaatttgattaatcatttttagtagaatttgtttttctcaac

SEQ ID NO: 5765 - DNA, 645 bp, Artificial
  Mutations within GlyA3B4 introduced by GmGlyA3B4_T03TALE nuclease
gttcatgtacggttgcagatataaacgaagcatagcttatgtatgaggtgtaacaaaattggaaacaatagccatgcaaggtgaagaatgtcaccaactcagaaacccttcttcattgacgtgtccctcactcactctcctctcttcactataaatcgccactcttcgtgttctccacttcaccaactccttcaaacttattaacactttccttagttcaatatggggaagcccttcttcactctctctctttcttccctttgcttgctactcttgtcgagtgcatgctttgctattacctccagcaaactcaacaacctcaacgcgttggaacccgaccaccgcgttgagtccgaaggtggtcttattgaaacatggaactctcaacaccctgagctgcaatgcgccggtgtcactgtttccaaacgcaccctcaaccgcaacggcctccacttgccatcttactcaccttatccccaaatgatcattgtcgttcaaggtgcgtaatattagtaagaagtatttatcagcttaacgtgataacaataatagtaatatgaaatatttattaaatttttataattaatctctgctagaaaatttgattaatcattttagtagaatttgttttctcaactaggtttt

SEQ ID NO: 5766 - DNA, 634 bp, Artificial; identical to SEQ ID NO: 5169
  Mutations within GlyA3B4 introduced by GmGlyA3B4_T03TALE nuclease

SEQ ID NO: 5767 - DNA, 669 bp, Artificial; identical to SEQ ID NO: 5219
  Mutations within GlyA3B4 introduced by GmGlyA3B4_T03TALE nuclease

SEQ ID NO: 5768 - DNA, 667 bp, Artificial
  Mutations within GlyA3B4 introduced by GmGlyA3B4_T03TALE nuclease
gttcatgtacggttgcagatataaacgaagcatagcttatgtatgaggtgtaacaaaaattggaaacaatagccatgcaaggtgaagaatgtcaccaactcagaaacccttcttcattgacgtgtccctcactcactctcctctcttcactataaatcgccactcttcgtgttctccacttcaccaactccttcaaacttattaacactttccttagttcaatatggggaagcccttcttcactctctctctttcttccctttgcttgctactcttgtcgagtgcatgctttgctattacctccagcaagagtgccaactcaacaacctcaacgcgttggaacccgaccaccgcgttgagtccgaaggtggtcttattgaaacatggaactctcaacaccctgagctgcaatgcgccggtgtcactgtttccaaacgcaccctcaccgcaacggcctccaacgcttgccatcttcactcaccttatcccaactgaatcattgtcgttcaggtgcgtaatattagtaagaagtatttatcagcttaacgtgataacaataatagtaatatgaaatatttattaaatttttataattaatctctgctagaaaatttgattaatcatttttagtagaatttgtttttctcaactaggttttaaaacacca

SEQ ID NO: 5769 - DNA, 631 bp, Artificial
  Mutations within GlyA3B4 introduced by GmGlyA3B4_T03TALE nuclease
gttcatgtacggttgcagatataaacgaagcatagcttatgtatgaggtgtaacaaaattggaaacaatagccatgcaaggtgaagaatgtcaccaactcagaaacccttcttcattgacgtgtccctcactcactctcctctcttcactataaatcgccactcttcgtgttctccacttcaccaactccttcaaacttattaacactttccttagttcaatatggggaagcccttcttcactctctctctttcttccctttgcttgctactcttgtcgagtgccaactcaacaacctcaacgcgttggaacccgaccaccgcgttgagtccgaaggtggtcttattgaaacatggaactctcaacaccctgagctgcaatgcgccggtgtcactgtttccaaaacgcaccctcaaccgcaacggcctccacttgccatcttactcaccttatccccaaatgatcattgtcgttcaaggtgcgtaatattagtaagaagtatttatcagcttaacgtgataacaataatagtaatatgaaatatttattaattttttataattaatctctgctagaaaatttgattaatcatttttagtagaatttgtttttctcaactaggttttaaaca

SEQ ID NO: 5770 - DNA, 621 bp, Artificial
  Mutations within GlyA3B4 introduced by GmGlyA3B4_T03TALE nuclease
gttcatgtacggttgcagatataaacgaagcatagcttatgtatgaggtgtaacaaaattggaaacaatagccatgcaaggtgaagaatgtcaccaactcagaaacccttcttcattgacgtgtccctcactcactctcctctcttcactataaatcgccactcttcgtgttctccacttcaccaactccttcaaacttattaacactttccttagttcaatatggggaagcccttcttcactctctctctttcttccctttgcttgctactcttgtcgagtgcatgctttgctattacctccagcaagttcaaccaactcaacaacctcaacgcgttggaacccgaccaccgcgttgagtccgaaggtggtcttattgaaacatggaactctcaacaccctgagctgcaatgcgccggtgtcactgtttccaaacgcaccctcaaccgcaacggcctccacttgccatcttactcaccttatccccaaatgatcattgtcgttcaaggtgcgtaatattagtaagaagtatttatcagcttaacgtgataacaataatagtaatatgaaatatttattaaatttttataattaatctctgctagaaaatttgattaatca

SEQ ID NO: 5771 - DNA, 659 bp, Artificial; identical to SEQ ID NO: 5109
  Mutations within GlyA3B4 introduced by GmGlyA3B4_T03TALE nuclease

SEQ ID NO: 5772 - DNA, 661 bp, Artificial; identical to SEQ ID NO: 5046
  Mutations within GlyA3B4 introduced by GmGlyA3B4_T03TALE nuclease

SEQ ID NO: 5773 - DNA, 643 bp, Artificial; identical to SEQ ID NO: 4888
  Mutations within GlyA3B4 introduced by GmGlyA3B4_T03TALE nuclease

SEQ ID NO: 5774 - DNA, 646 bp, Artificial
  Mutations within GlyA3B4 introduced by GmGlyA3B4_T03TALE nuclease
gttcatgtacggttgcagatataaacgaagcatagcttatgtatgaggtgtaacaaaattggaaacaatagccatgcaaggtgaagaatgtcaccaactcagaaacccttcttcattgacgtgtccctcactcactctcctctcttcactataaatcgccactcttcgtgttctccacttcaccaactccttcaaacttattaacactttccttagttcaatatggggaagcccttcttcactctctctctttcttccctttgcttgctactcttgtcgagtgcatgctttgctattacctccagcaagtgagtgccaactcaacaacctcaacgcgttggaacccgaccaccgcgttgagtccgaaggtggtcttattgaaacatggaactctcaacaccctgagctgcaatgcgccggtgtcactgtttccaaacgcaccctcaaccgcaacggcctccacttgccatcttactcaccttatccccaaatgatcattgtcgttcaaggtgcgtaatattagtaagaagtatttatcagcttaacgtgataacaatatagtaatatgaaatatttattaaatttttataattaatctctgctagaaaatttgattaatcattttagtagaatttgttttctcaac

SEQ ID NO: 5775 - DNA, 601 bp, Artificial
  Mutations within GlyA3B4 introduced by GmGlyA3B4_T03TALE nuclease
gttcatgtacggttgcagatataaacgaagcatagcttatgtatgaggtgtaacaaaattggaaacaatagccatgcaaggtgaagaatgtcaccaactcagaaacccttcttcattgacgtgtccctcactcactctcctctcttcactataaatcgccactcttcgtgttctccacttcaccaactccttcaaacttattaacactttccttagttcaatatggggaagcccttcttcactctctctctttcttccctttgcttgctactcttgtcgagtgccaactcaacaacctcaacgcgttggaacccgaccaccgcgttgagtccgaaggtggtcttattgaaacatggaactctcaacaccctgagctgcaatgcgccggtgtcactgtttccaaaacgcaccctcaaccgcaacggcctccacttgccatcttactcaccttatccccaaatgatcattgtcgttcaaggtgcgtaatattagtaagaagtatttatcagcttaacgtgataacaataatagtaatatgaaatatttattaattttttataattaatctctgctagaaaatttgattaatcatttttagtag

SEQ ID NO: 5776 - DNA, 668 bp, Artificial
  Mutations within GlyA3B4 introduced by GmGlyA3B4_T03TALE nuclease
gttcatgtacggttgcagatataaacgaagcatagcttatgtatgaggtgtaacaaaattggaaacaatagccatgcaaggtgaagaatgtcaccaactcagaaacccttcttcattgacgtgtccctcactcactctcctctcttcactataaatcgccactcttcgtgttctccacttcaccaactccttcaaacttattaacactttccttagttcaatatggggaagcccttcttcactctctctctttcttccctttgcttgctactcttgtcgagtgcatgctttgctattacctccagcaagttcgagtgccaactcaacaacctcaacgcgttggaacccgaccaccgcgttgagtccgaaggtggtcttattgaaacatggaactctcaacaccctgagctgcaatgcgccggtgtcactgtttccaaacgcaccctcaaccgcaacggcctccacttgccatcttactcaccttatccccaaatgatcattgtcgttcaaggtgcgtaatattagtaagagtatttatcagcttaacgtgataacaatatagtaatatgaaaatatttattaaatttttataattaatctctgctagaaaatttgattaatcattttagtagaatttgtttttctcaactaggtttttaaacaccaca

SEQ ID NO: 5777 - DNA, 637 bp, Artificial; identical to SEQ ID NO: 5307
  Mutations within GlyA3B4 introduced by GmGlyA3B4_T03TALE nuclease

SEQ ID NO: 5778 - DNA, 381 bp, Artificial
  Mutations within GlyA3B4 introduced by GmGlyA3B4_T03TALE nuclease
gttcatgtacggttgcagatataaacgaagcatagcttatgtatgaggtgtaacaaaattggaaacaatagccatgcaaggtgaagaatgtcaccaactcagaaacccttcttcattgacgtgtccctcactcactctcctctcttcactataaatcgccactcttcgtgttctccacttcaccaactccttcaaacttattaacactttccttagttcaatatggggaagcccttcttcactctctctctttcttccctttgcttgctactcttgtcgagtgcatgctttgctattacctccagcaagccaactcaacaacctcaacgcgttggaacccgaccaccgcgttgagtccgaaggtggtcttattgaacatgg

SEQ ID NO: 5779 - DNA, 650 bp, Artificial
  Mutations within GlyA3B4 introduced by GmGlyA3B4_T03TALE nuclease
gttcatgtacggttgcagatataaacgaagcatagcttatgtatgaggtgtaacaaaattggaaacaatagccatgcaaggtgaagaatgtcaccaactcagaaacccttcttcattgacgtgtccctcactcactctcctctcttcactataaatcgccactcttcgtgttctccacttcaccaactccttcaaacttattaacactttccttagttcaatgtggggaagcccttcttcactctctctctttcttccctttgcttgctactcttgtcgagtgcatgctttgctattacctccagcaagttcaacgcgttggaacccgaccaccgcgttgagtccgaaggtggtcttattgaaacatggaactctcaacaccctgagctgcaatgcgccggtgtcactgtttccaaacgcaccctcaaccgcaacggcctccacttgccatcttactcaccttatcccccaaatgatcattgtcgttcaaggtgcgtaatattagtaagaagtatttatcagcttaacgtgataacaataatagtaatatgaaatatttattaaattttttataattaatctctgctagaaaatttgattaatcatttttagtagaatttgtttttctcaactaggttttaaacaccaca

SEQ ID NO: 5780 - DNA, 667 bp, Artificial
  Mutations within GlyA3B4 introduced by GmGlyA3B4_T03TALE nuclease
gttcatgtacggttgcagatataaacgaagcatagcttatgtatgaggtgtaacaaaattggaaacaatagccatgcaaggtgaagaatgtcaccaactcagaaacccttcttcattgacgtgtccctcactcactctcctctcttcactataaatcgccactcttcgtgttctccacttcaccaactccttcaaacttattaacactttccttagttcaatatggggaagcccttcttcactctctctctttcttccctttgcttgctactcttgtcgagtgcatgctttgctattacctccagcaagttcaagtgccaactcaacaacctcaacgcgttggaacccgaccaccgcgttgagtccgaaggtggtcttattgaaacatggaactctcaacaccctgagctgcaatgcgccggtgtcactgtttccaaacgcaccctcaaccgcaacggcctccacttgccatcttactcaccttatccccaaatgatcattgtcgttcaaggtgcgtaatattagtaagaagtatttatcagcttaacgtgataacaataatagtaatatgaaatatttattaaatttttataattaatactctgctagaaaatttgattaatcattttagtagaatttgttttctcaactaggttttaaaacacca

SEQ ID NO: 5781 - DNA, 635 bp, Artificial; identical to SEQ ID NO: 5186
  Mutations within GlyA3B4 introduced by GmGlyA3B4_T03TALE nuclease

SEQ ID NO: 5782 - DNA, 526 bp, Artificial; identical to SEQ ID NO: 5066
  Mutations within GlyA3B4 introduced by GmGlyA3B4_T03TALE nuclease

SEQ ID NO: 5783 - DNA, 445 bp, Artificial; identical to SEQ ID NO: 4799
  Mutations within GlyA3B4 introduced by GmGlyA3B4_T03TALE nuclease

SEQ ID NO: 5784 - DNA, 659 bp, Artificial
  Mutations within GlyA3B4 introduced by GmGlyA3B4_T03TALE nuclease
gttcatgtacggttgcagatataaacgaagcatagcttatgtatgaggtgtaacaaaattggaaacaatagccatgcaaggtgaagaatgtcaccaactcagaaacccttcttcattgacgtgtccctcactcactctcctctcttcactataaatcgccactcttcgtgttctccacttcaccaactccttcaaacttattaacactttccttagttcaatatggggaagcccttcttcactctctctctttcttccctttgcttgctactcttgtcgagtgcatgctttgctattacctccagcaaagtgccaactcaacaacctcaacgcgttggaacccgaccaccgcgttgagtccgaaggtggtcttattgaaacatggaactctcaacaccctgagctgcaatgcgccggtgtcactgtttccaaacgcaccctcaaccgcaacggcctccacttgccatcttactcaccttatccccaaatgatcattgtcgttcaaggtgcgtaatattagtaagaagtatttatcagcttaacgtgataacaatatagtaatatgaaatatttattaaatttttataatttaatctctgctagaaaatttgattaatcatttttagtagaatttgtttttctcaactaggtttttaaaa

SEQ ID NO: 5785 - DNA, 618 bp, Artificial
  Mutations within GlyA3B4 introduced by GmGlyA3B4_T03TALE nuclease
gttcatgtacggttgcagatataaacgaagcatagcttatgtatgaggtgtaacaaaattggaaacaatagccatgcaaggtgaagaatgtcaccaactcagaaacccttcttcattgacgtgtccctcactcactctcctctcttcactataaatcgccactcttcgtgttctccacttcaccaactccttcaaacttattaacactttccttagttcaatatggggaagcccttcttcactctctctctttcttccctttgcttgctactcttgtcgagtgcatgctttgctattacctccagcgagtgccaactcaacaacctcaacgcgttggaacccgaccaccgcgttgagtccgaaggtggtcttattgaaacatggaactctcaacaccctgagctgcaatgcgccggtgtcactgtttccaaacgcaccctcaaccgcaacggcctccacttgccatcttactcaccttatccccaaatgatcattgtcgttcaaggtgcgtaatattagtaagaagtatttatcagcttaacgtgataacaataatagtaatatgaaatatttattaaatttttataattaatctctgctagaaaatttgattaatca

SEQ ID NO: 5786 - DNA, 643 bp, Artificial; identical to SEQ ID NO: 4954
  Mutations within GlyA3B4 introduced by GmGlyA3B4_T03TALE nuclease

SEQ ID NO: 5787 - DNA, 631 bp, Artificial
  Mutations within GlyA3B4 introduced by GmGlyA3B4_T03TALE nuclease
gttcatgtacggttgcagatataaacgaagcatagcttatgtatgaggtgtaacaaaaattggaaacaatagccatgcaaggtgaagaatgtcaccaactcagaaacccttcttcattgacgtgtccctcactcactctcctctcttcactataaatcgccactcttcgtgttctccacttcaccaactccttcaaacttattaacactttccttagttcaatatggggaagcccttcttcactctctctctttcttccctttgcttgctactcttgtcgagtgcatgctttgctattacctccagcaaccaactcaacaacctcaacgcgttggaacccgaccaccgcgttgagtccgaaggtggtcttattgaacatggactctcacaccctgagctgcatgcgccggtgtcactgtttccaaacgcaccctcaaccgcaacggcctccacttgccatcttactcaccttatccccaaatgatcattgtcgttcaaggtgcgtaatattagtaagaagtatttatcagcttaacgtgatacaatatagtaatatgaaatatttattaaatttttataattaatctctgctagaaaatttgattaatcatttttagtagaatttgttttt

SEQ ID NO: 5788 - DNA, 638 bp, Artificial; identical to SEQ ID NO: 5089
  Mutations within GlyA3B4 introduced by GmGlyA3B4_T03TALE nuclease

SEQ ID NO: 5789 - DNA, 664 bp, Artificial
  Mutations within GlyA3B4 introduced by GmGlyA3B4_T03TALE nuclease
gttcatgtacggttgcagatataaacgaagcatagcttatgtatgaggtgtaacaaaattggaaacaatagccatgcaaggtgaagaatgtcaccaactcagaaacccttcttcattgacgtgtccctcactcactctcctctcttcactataaatcgccactcttcgtgttctccacttcaccaactccttcaaacttattaacactttccttagttcaatatggggaagcccttcttcactctctctctttcttccctttgcttgctactcttgtcgagtgcatgctttgctattacctccagcaagttagtgccaactcaacaaactcaacgcgttggaacccgaccaccgcgttgagtccgaaggtggtcttattgaaacatggaactctcaacaccctgagctgcaatgcgccggtgtcactgtttccaaacgcaccctcaaccgcaacggcctccacttgccatcttactcaccttatccccaaatgatcattgtcgttcaaggtgcgtaatattagtaagaagtatttatcagcttaacgtgataacaataatagtaatatgaaatatttattaaatttttataattaatctctgctagaaaatttgattaatcattttagtagaatttgttttctcaactaggttttaaaacacca

SEQ ID NO: 5790 - DNA, 663 bp, Artificial
  Mutations within GlyA3B4 introduced by GmGlyA3B4_T03TALE nuclease
gttcatgtacggttgcagatataaacgaagcatagcttatgtatgaggtgtaacaaaattggaaacaatagccatgcaaggtgaagaatgtcaccaactcagaaacccttcttcattgacgtgtccctcactcactctcctctcttcactataaatcgccactcttcgtgttctccacttcaccaactccttcaaacttattaacactttccttagttcaatatggggaagcccttcttcactctctctctttcttccctttgcttgctactcttgtcgagtgcatgctttgctattacctccagcaagttcaaccaactcaacaacctcaacgcgttggaacccgaccaccgcgttgagtccgaaggtggtcttattgaaacatggaactctcaacaccctgagctgcaatgcgccggtgtcactgtttccaaacgcaccctcaaccgcaacggcctccacttgccatcttactcaccttatccccaaatgatcattgtcgttcaaggtgcgtaatattagtaagaagtatttatcagcttaacgtgataacaataatagtaatatgaaatatttattaaatttttataattaatctctgctagaaaatttgattaatcattttagtagaatttgttttctcaactaggttttaaaacacca

SEQ ID NO: 5791 - DNA, 664 bp, Artificial
  Mutations within GlyA3B4 introduced by GmGlyA3B4_T03TALE nuclease
gttcatgtacggttgcagatataaacgaagcatagcttatgtatgaggtgtaacaaaattggaaacaatagccatgcaaggtgaagaatgtcaccaactcagaaacccttcttcattgacgtgtccctcactcactctcctctcttcactataaatcgccactcttcgtgttctccacttcaccaactccttcaaacttattaacactttccttagttcaatatggggaagcccttcttcactctctctctttcttccctttgcttgctactcttgtcgagtgcatgctttgctattacctccagcaagttgtgccaactcaacaacctcaacgcgttggaacccgaccaccgcgttgagtccgaaggtggtcttattgaaacatggaactctcaacaccctgagctgcaatgcgccggtgtcactgtttccaaacgcaccctcaaccgcaacggcctccacttgccatcttactcaccttatccccaactgatcattgtcgttcaaggtgcgtaatattagtaagaagtatttatcagcttaacgtgataacaataatagtaatatgaaatatttattaaatttttataattaatctctgctagaaaatttgattaatcatttttagtagaatttgtttttctcaactaggttttaaacacca

SEQ ID NO: 5792 - DNA, 644 bp, Artificial
  Mutations within GlyA3B4 introduced by GmGlyA3B4_T03TALE nuclease
gttcatgtacggttgcagatataaacgaagcatagcttatgtatgaggtgtaacaaaattggaaacaatagccatgcaaggtgaagaatgtcaccaactcagaaacccttcttcattgacgtgtccctcactcactctcctctcttcactataaatcgccactcttcgtgttctccacttcaccaactccttcaaacttattaacactttccttagttcaatatggggaagcccttcttcactctctctctttcttccctttgcttgctactcttgtcgagtgcatgctttgctattacctccagcaagtgtgccaactcaacaacctcaacgcgttggaacccgaccaccgcgttgagtccgaaggtggtcttattgaaacatggaactctcaacaccctgagctgcaatgcgccggtgtcactgtttccaaacgcaccctcaaccgcaacggcctccacttgccatcttactcaccttatccccaaatgatcattgtcgttcaaggtgcgtaatattagtaagaagtatttatcagcttaacgtgataacaataatagtaatatgaaatatttattaaatttttataattaatctctgctagaaaatttgattaatcattttagtagaatttgttttctcaa

SEQ ID NO: 5793 - DNA, 647 bp, Artificial
  Mutations within GlyA3B4 introduced by GmGlyA3B4_T03TALE nuclease
gttcatgtacggttgcagatataaacgaagcatagcttatgtatgaggtgtaacaaaattggaaacaatagccatgcaaggtgaagaatgtcaccaactcagaaacccttcttcattgacgtgtccctcactcactctcctctcttcactataaatcgccactcttcgtgttctccacttcaccaactccttcaaacttattaacactttccttagttcaatatggggaagcccttcttcactctctctctttcttccctttgcttgctactcttgtcgagtgcatgctttgctattacctccagcaaagtgccaactcaacaacctcaacgcgttggaacccgaccaccgcgttgagtccgaaggtggtcttattgaaacatggaactctcaacaccctgagctgcaatgcgccggtgtcactgtttccaaacgcaccctcaaccgcaacggcctccacttgccatcttactcaccttatccccaaatgatcattgtcgttcaaggtgcgtaatattagtaagaagtatttatcagcttaacgtgataacaatatagtaatatgaaatatttattaaatttttataattaatctctgctagaaaatttgattaatcattttagtagaatttgttttctcaactagg

SEQ ID NO: 5794 - DNA, 646 bp, Artificial; identical to SEQ ID NO: 4907
  Mutations within GlyA3B4 introduced by GmGlyA3B4_T03TALE nuclease

SEQ ID NO: 5795 - DNA, 647 bp, Artificial
  Mutations within GlyA3B4 introduced by GmGlyA3B4_T03TALE nuclease
gttcatgtacggttgcagatataaacgaagcatagcttatgtatgaggtgtaacaaaattggaaacaatagccatgcaaggtgaagaatgtcaccaactcagaaacccttcttcattgacgtgtccctcactcactctcctctcttcactataaatcgccactcttcgtgttctccacttcaccaactccttcaaacttattaacactttccttagttcaatatggggaagcccttcttcactctctctctttcttccctttgcttgctactcttgtcgagtgcatgctttgctattacctccagcaagtcagtgccaactcaacaacctcaacgcgttggaacccgaccaccgcgttgagtccgaaggtggtcttattgaaacatggaactctcaacaccctgagctgcaatgcgccggtgtcactgtttccaaacgcaccctcaaccgcaacggcctccacttgccatcttactcaccttatccccaaatgatcattgtcgttcaaggtgcgtaatattagtaagaagtatttatcagcttaacgtgataacaataatagtaatatgaaatatttattaaatttttataattaatctctgctagaaaatttgattaatcattttagtagaatttgtttttctcaa

SEQ ID NO: 5796 - DNA, 661 bp, Artificial
  Mutations within GlyA3B4 introduced by GmGlyA3B4_T03TALE nuclease
gttcatgtacggttgcagatataaacgaagcatagcttatgtatgaggtgtaacaaaattggaaacaatagccatgcaaggtgaagaatgtcaccaactcagaaacccttcttcattgacgtgtccctcactcactctcctctcttcactataaatcgccactcttcgtgttctccacttcaccaactccttcaaacttattaacactttccttagttcaatatggggaagcccttcttcactctctctctttcttccctttgcttgctactcttgtcgagtgcatgctttgctattacctccagcaagttcgagtgccaactcaacaacctcaacgcgttggaacccgaccaccgcgttgagtccgaaggtggtcttattgaaacatggaactctcaacaccctgagctgcaatgcgccggtgtcactgtttccaaacgcaccctcaaccgcaacggcctccacttgccatcttactcaccttatccccaaatgatcattgtcgttcaaggtgcgtaatattagtaagagtatttatcagcttaacgtgataacaatatagtaatatgaaatatttattaaatttttataattaatctctgctagaaaatttgattaatcattttagtagaatttgtttttctcaactaggtttttaaaa

SEQ ID NO: 5797 - DNA, 662 bp, Artificial; identical to SEQ ID NO: 5687
  Mutations within GlyA3B4 introduced by GmGlyA3B4_T03TALE nuclease

SEQ ID NO: 5798 - DNA, 657 bp, Artificial
  Mutations within GlyA3B4 introduced by GmGlyA3B4_T03TALE nuclease
gttcatgtacggttgcagatataaacgaagcatagcttatgtatgaggtgtaacaaaattggaaacaatagccatgcaaggtgaagaatgtcaccaactcagaaacccttcttcattgacgtgtccctcactcactctcctctcttcactataaatcgccactcttcgtgttctccacttcaccaactccttcaaacttattaacactttccttagttcaatatggggaagcccttcttcactctctctctttcttccctttgcttgctactcttgtcgagtgcatgctttgctattacctccagcaaccaactcaacaacctcaacgcgttggaacccgaccaccgcgttgagtccgaaggtggtcttattgaaacatggaactctcaacaccctgagctgcaatgcgccggtgtcactgtttccaaacgcaccctcaaccgcaacggcctccacttgccatcttactcaccttatccccaaatgatcattgtcgttcaaggtgcgtaatattagtaagaagtatttatcagcttaacgtgataacaataatagtaatatgaaatatttattaaatttttataattaatctctgctagaaaatttgattaatcattttagtagaatttgttttctcaactaggttttaaaacacca

SEQ ID NO: 5799 - DNA, 653 bp, Artificial
  Mutations within GlyA3B4 introduced by GmGlyA3B4_T03TALE nuclease
gttcatgtacggttgcagatataaacgaagcatagcttatgtatgaggtgtaacaaaattggaaacaatagccatgcaaggtgaagaatgtcaccaactcagaaacccttcttcattgacgtgtccctcactcactctcctctcttcactataaatcgccactcttcgtgttctccacttcaccaactccttcaaacttattaacactttccttagttcaatatggggaagcccttcttcactctctctctttcttccctttgcttgctactcttgtcgagtgcatgctttgctattgccaactcaacaacctcaacgcgttggaacccgaccaccgcgttgagtccgaaggtggtcttattgaaacatggaactctcaacaccctgagctgcaatgcgccggtgtcactgtttccaaacgcaccctcaaccgcaacggcctccacttgccatcttactcaccttatccccaaatgatcattgtcgttcaaggtgcgtaatattagtaagaagtatttatcagcttaacgtgataacaataatagtaatatgaaatatttattaaattttttataattaatctctgctagaaaatttgattaatcatttttagtagaatttgttttttctcaactaggttttaaaacaccaca

SEQ ID NO: 5800 - DNA, 731 bp, Artificial
  Mutations within GlyA3B4 introduced by GmGlyA3B4_T03TALE nuclease
gttcatgtacggttgcagatataaacgaagcatagcttatgtatgaggtgtaacaaaattggaaacaatagccatgcaaggtgaagaatgtcaccaactcagaaacccttcttcattgacgtgtccctcactcactctcctctcttcactataaatcgccactcttcgtgttctccacttcaccaactccttcaaacttattaacactttccttagttcaatatggggaagcccttcttcactctctctctttcttccctttgcttgctactcttgtcgagtgcatgctttgctattacctccagcaagttcagcggataacaatttcacacaggaaacagctatgaccatgattacgccaagcttgcatgcaggcctctgcagtcgacgggcccgggatccgatccaatgctatgaccatgattacgaattcccgagtgccaactcaacaacctcaacgcgttggaacccgaccaccgcgttgagtccgaaggtggtcttattgaacatggaactctcaacacctgagctgcaatgcgccggtgtcactgtttccaaacgcaccctcaaccgcaacggcctccacttgccatcttactcaccttatccccaaatgatcattgtcgttcaaggtgcgtaatcattagtaagaagtatttatcagctaacgtgataacaataattagtaatatgaaatatttattaaattttttataattaatctctgctag

SEQ ID NO: 5801 - DNA, 540 bp, Artificial
  Mutations within GlyA3B4 introduced by GmGlyA3B4_T03TALE nuclease
gttcatgtacggttgcagatataaacgaagcatagcttatgtatgaggtgtaacaaaattggaaacaatagccatgcaaggtgaagaatgtcaccaactcagaaacccttcttcattgacgtgtccctcactcactctcctctcttcactataaatcgccactcttcgtgttctccacttcaccaactccttcaaacttattaacactttccttagttcaatatggggaagcccttcttcactctctctctttcttccctttgcttgctactcttgtcgagtgcatgctttgctattaacgcgttggaacccgaccaccgcgttgagtccgaaggtggtcttattgaaacatggaactctcaacaccctgagctgcaatgcgccggtgtcactgtttccaaacgcaccctcaaccgcaacggcctccacttgccatcttactcaccttatccccaaatgatcattgtcgttcaaggtgcgtaatattagtaagaagtatttatcagcttaacgtgataacaataatagtaatatgaaata

SEQ ID NO: 5802 - DNA, 650 bp, Artificial
  Mutations within GlyA3B4 introduced by GmGlyA3B4_T03TALE nuclease
gttcatgtacggttgcagatataaacgaagcatagcttatgtatgaggtgtaacaaaattggaaacaatagccatgcaaggtgaagaatgtcaccaactcagaaacccttcttcattgacgtgtccctcactcactctcctctcttcactataaatcgccactcttcgtgttctccacttcaccaactccttcaaacttattaacactttccttagttcaatatggggaagcccttcttcactctctctctttcttccctttgcttgctactcttgtcgagtgcatgctttgctattacctccagcaagttcaaactcaacaacctcaacgcgttggaacccgaccaccgcgttgagtccgaaggtggtcttattgaaacatggaactctcaacaccctgagctgcaatgcgccggtgtcactgtttccaaacgcaccctcaaccgcaacggcctccacttgccatcttactcaccttatccccaaatgatcattgtcgttcaaggtgcgtaatattagtaagaagtatttatcagcttaacgtgataacaatatagtaatatgaaatatttattaaatttttataattaatctctgctagaaaatttgattaatcattttagtagaatttgttttctcaactaggtttt

SEQ ID NO: 5803 - DNA, 636 bp, Artificial
  Mutations within GlyA3B4 introduced by GmGlyA3B4_T03TALE nuclease
gttcatgtacggttgcagatataaacgaagcatagcttatgtatgaggtgtaacaaaattggaaacaatagccatgcaaggtgaagaatgtcaccaactcagaaacccttcttcattgacgtgtccctcactcactctcctctcttcactataaatcgccactcttcgtgttctccacttcaccaactccttcaaacttattaacactttccttagttcaatatggggaagcccttcttcactctctctctttcttccctttgcttgctactcttgtcgagtgcatgctttgctattacctccagcaagttagtgccaactcaacaacctcaacgcgttggaacccgaccaccgcgttgagtccgaaggtggtcttattgaaacatggaactctcaacaccctgagctgcaatgcgccggtgtcactgtttccaaacgcaccctcaaccgcaacggcctccacttgccatcttactcaccttatccccaaatgatcattgtcgttcaaggtgcgtaatattagtaagaagtatttatcagcttaacgtgataacaatatagtaatatgaaatatttattaaatttttataattaatctctgctagaaaatttgattaatcattttagtagaatttg

SEQ ID NO: 5804 - DNA, 605 bp, Artificial
  Mutations within GlyA3B4 introduced by GmGlyA3B4_T03TALE nuclease
gttcatgtacggttgcagatataaacgaagcatagcttatgtatgaggtgtaacaaaattggaaacaatagccatgcaaggtgaagaatgtcaccaactcagaaacccttcttcattgacgtgtccctcactcactctcctctcttcactataaatcgccactcttcgtgttctccacttcaccaactccttcaaacttattaacactttccttagttcaatatggggaagcccttcttcactctctctctttcttccctttgcttgctactcttgtcgagtgcatgctttgctattacctccagcaagttctgccaactcaacaacctcaacgcgttggaacccgaccaccgcgttgagtccgaaggtggtcttattgaaacatggaactctcaacaccctgagctgcaatgcgccggtgtcactgtttccaaacgcaccctcaaccgcaacggcctccacttgccatcttactcaccttatccccaaatgatcattgtcgttcaaggtgcgtaatattagtaagaagtatttatcagcttaacgtgataacaataatagtaatatgaaatatttattaaatttttataattaatctctgctag

SEQ ID NO: 5805 - DNA, 663 bp, Artificial; identical to SEQ ID NO: 4967
  Mutations within GlyA3B4 introduced by GmGlyA3B4_T03TALE nuclease

SEQ ID NO: 5806 - DNA, 617 bp, Artificial
  Mutations within GlyA3B4 introduced by GmGlyA3B4_T03TALE nuclease
gttcatgtacggttgcagatataaacgaagcatagcttatgtatgaggtgtaacaaaattggaaacaatagccatgcaaggtgaagaatgtcaccaactcagaaacccttcttcattgacgtgtccctcactcactctcctctcttcactataaatcgccactcttcgtgttctccacttcaccaactccttcaaacttattaacactttccttagttcaatatggggaagcccttcttcactctctctctttcttccctttgcttgctactcttgtcgagtgcatgctttgctattacctccagcgagtgccaactcaacaacctcaacgcgttggaacccgaccaccgcgttgagtccgaaggtggtcttattgaaacatggaactctcaacaccctgagctgcaatgcgccggtgtcactgtttccaaacgcaccctcaaccgcaacggcctccacttgccatcttactcaccttatccccaaatgatcattgtcgttcaaggtgcgtaatattagtaagaagtatttatcagcttaacgtgataacaatatagtaatatgaaatatttattaaatttttataattaatctctgctagaaaatttgattaatca

SEQ ID NO: 5807 - DNA, 653 bp, Artificial
  Mutations within GlyA3B4 introduced by GmGlyA3B4_T03TALE nuclease
gttcatgtacggttgcagatataaacgaagcatagcttatgtatgaggtgtaacaaaattggaaacaatagccatgcaaggtgaagaatgtcaccaactcagaaacccttcttcattgacgtgtccctcactcactctcctctcttcactataaatcgccactcttcgtgttctccacttcaccaactccttcaaacttattaacactttccttagttcaatatggggaagcccttcttcactctctctctttcttccctttgcttgctactcttgtcgagtgcatgctttgctattacctccagcaactcaacaacctcaacgcgttggaacccgaccaccgcgttgagtccgaaggtggtcttattgaaacatggaactctcaacaccctgagctgcaatgcgccggtgtcactgtttccaaacgcaccctcaaccgcaacggcctccacttgccatcttactcaccttatccccaaatgatcattgtcgttcaaggtgcgtaatattagtaagaagtatttatcagcttaacgtgataacaataatagtaatatgaaatatttattaaatttttataattaatctctgctagaaaatttgattaatcattttagtagaatttgttttctcaactaggttttaaaacacca

SEQ ID NO: 5808 - DNA, 539 bp, Artificial
  Mutations within GlyA3B4 introduced by GmGlyA3B4_T03TALE nuclease
gttcatgtacggttgcagatataaacgaagcatagcttatgtatgaggtgtaacaaaattggaaacaatagccatgcaaggtgaagaatgtcaccaactcagaaacccttcttcattgacgtgtccctcactcactctcctctcttcactataaatcgccactcttcgtgttctccacttcaccaactccttcaaacttattaacactttccttagttcaatatggggaagcccttcttcactcaacgcggtggtcaacaacctcaacgcgttggaacccgaccaccgcgttgagtccgaaggtggtcttattgaaacatggaactctcaacaccctgagctgcaatgcgccggtgtcactgtttccaaacgcaccctcaaccgcaacggcctccacttgccatcttactcaccttatccccaaatgatcattgtcgttcaaggtgcgtaatattagtaagaagtatttatcagcttaacgtgatacaataatagtaatatgaatatttattaaatttttataattaattctctgctag

SEQ ID NO: 5809 - DNA, 657 bp, Artificial
  Mutations within GlyA3B4 introduced by GmGlyA3B4_T03TALE nuclease
gttcatgtacggttgcagatataaacgaagcatagcttatgtatgaggtgtaacaaaattggaaacaatagccatgcaaggtgaagaatgtcaccaactcagaaacccttcttcattgacgtgtccctcactcactctcctctcttcactataaatcgccactcttcgtgttctccacttcaccaactccttcaaacttattaacactttccttagttcaatatggggaagcccttcttcactctctctctttcttccctttgcttgctactcttgtcgagtgcatgctttgctattacctccagtgccaactcaacaacctcaacgcgttggaacccgaccaccgcgttgagtccgaaggtggtcttattgaacatggaactctcaacaccctgagctgcaatgcgccggtgtcactgtttccaaacgcaccctcaaccgcaacggcctccacttgccatcttactcaccttatccccaactgaatcattgtcgttcaaggtgcgtaatattagtaagaagtatttatcagcttaacgtgataacaataatagtaatatgaaatatttattaaatttttataattaatctctgctagaaaatttgattaatcattttagtagaatttgtttttctcaactaggttttaaaacacca

SEQ ID NO: 5810 - DNA, 665 bp, Artificial; identical to SEQ ID NO: 4918
  Mutations within GlyA3B4 introduced by GmGlyA3B4_T03TALE nuclease

SEQ ID NO: 5811 - DNA, 634 bp, Artificial
  Mutations within GlyA3B4 introduced by GmGlyA3B4_T03TALE nuclease
gttcatgtacggttgcagatataaacgaagcatagcttatgtatgaggtgtaacaaaattggaaacaatagccatgcaaggtgaagaatgtcaccaactcagaaacccttcttcattgacgtgtccctcactcactctcctctcttcactataaatcgccactcttcgtgttctccacttcaccaactccttcaaacttattaacactttccttagttcaatatggggaagcccttcttcactctctctctttcttccctttgcttgctactcttgtcgagtgcatgctttgctattacctccagcaaggtgccaactcaacaacctcaacgcgttggaacccgaccaccgcgttgagtccgaaggtggtcttattgaaacatggaactctcaacaccctgagctgcaatgcgccggtgtcactgtttccaaacgcaccctcaaccgcaacggcctccacttgccatcttactcaccttatccccaaatgatcattgtcgttcaaggtgcgtaatattagtaagaagtatttatcagcttaacgtgataacaataatagtaatatgaaatatttattaaatttttataattaatctctgctagaaaatttgattaatcattttagtagaatttg

SEQ ID NO: 5812 - DNA, 660 bp, Artificial
  Mutations within GlyA3B4 introduced by GmGlyA3B4_T03TALE nuclease
gttcatgtacggttgcagatataaacgaagcatagcttatgtatgaggtgtaacaaaattggaaacaatagccatgcaaggtgaagaatgtcaccaactcagaaacccttcttcattgacgtgtccctcactcactctcctctcttcactataaatcgccactcttcgtgttctccacttcaccaactccttcaaacttattaacactttccttagttcaatatggggaagcccttcttcactctctctctttcttccctttgcttgctactcttgtcgagtgcatgctttgctattacctccagcaatgccaactcaacaacctcaacgcgttggaacacgaccaccgcgttgagtccgaaggtggtcttattgaaacatggaactctcaacaccctgagctgcaatgcgccggtgtcactgtttccaaacgcaccctcaaccgcaacggcctccacttgccatcttactcaccttatccccaaatgatcattgtcgttcaaggtgcgtaatattagtaagaagtatttatcagcttaacgtgataacaataatagtaatatgaaatatttattaaatttttataattaatctctgctagaaaatttgattaatcattttagtagaatttgtttttctcaactaggttttaaaacacca

SEQ ID NO: 5813 - DNA, 650 bp, Artificial
  Mutations within GlyA3B4 introduced by GmGlyA3B4_T03TALE nuclease
gttcatgtacggttgcagatataaacgaagcatagcttatgtatgaggtgtaacaaaattggaaacaatagccatgcaaggtgaagaatgtcaccaactcagaaacccttcttcattgacgtgtccctcactcactctcctctcttcactataaatcgccactcttcgtgttctccacttcaccaactccttcaaacttattaacactttccttagttcaatatggggaagcccttcttcactctctctctttcttccctttgcttgctactcttgtcgagtgcatgctttgctattacctccagcaagtgccaactcaacaacctcaacgcgttggaacccgaccaccgcgttgagtcccgaaggtggtcttattgaaacatggaactctcaacaccctgagctgcaatgcgccggtgtcactgtttccaaacgcaccctcaaccgcaacggcctccacttgccatcttactcaccttatccccaaatgatcattgtcgttcaaggtgcgtaatattagtaagaagtatttatcagcttaacgtgataacaataatagtaatatgaaatatttattaaatttttataatttaatctctgctagaaaatttgattaatcattttagtagaatttgtttttctcaactagg

SEQ ID NO: 5814 - DNA, 622 bp, Artificial; identical to SEQ ID NO: 5075
  Mutations within GlyA3B4 introduced by GmGlyA3B4_T03TALE nuclease

SEQ ID NO: 5815 - DNA, 650 bp, Artificial
  Mutations within GlyA3B4 introduced by GmGlyA3B4_T03TALE nuclease
gttcatgtacggttgcagatataaacgaagcatagcttatgtatgaggtgtaacaaaattggaaacaatagccatgcaaggtgaagaatgtcaccaactcagaaacccttcttcattgacgtgtccctcactcactctcctctcttcactataaatcgccactcttcgtgttctccacttcaccaactccttcaaacttattaacactttccttagttcaatatggggaagcccttcttcactctctctctttcttccctttgcttgctactcttgtcgagtgcatgctttgctattacctccagcaatgccaactcaacaacctcaacgcgttggaacccgaccaccgcgttgagtccgaaggtggtcttattgaaacatggaactctcaacaccctgagctgcaatgcgccggtgtcactgtttccaaacgcaccctcaaccgcaacggcctccacttgccatcttactcaccttatccccaaatgatcattgtcgttcaaggtgcgtaatattagtaagaagtatttatcagcttaacgtgataacaatatagtaatatgaaatatttattaaatttttataattaatctctgctagaaaatttgattaatcattttagtagaatttgtttttctcaactaggtttt

SEQ ID NO: 5816 - DNA, 662 bp, Artificial
  Mutations within GlyA3B4 introduced by GmGlyA3B4_T03TALE nuclease
gttcatgtacggttgcagatataaacgaagcatagcttatgtatgaggtgtaacaaaattggaaacaatagccatgcaaggtgaagaatgtcaccaactcagaaacccttcttcattgacgtgtccctcactcactctcctctcttcactataaatcgccactcttcgtgttctccacttcaccaactccttcaaacttattaacactttccttagttcaatatggggaagcccttcttcactctctctctttcttccctttgcttgctactcttgtcgagtgcatgctttgctattacctccagcaagagtgccaactcaacaacctcaacgcgttggaacccgaccaccgcgttgagtccgaaggtggtcttattgaaacatggaactctcaacaccctgagctacaatgcgccggtgtcactgtttccaaacgcaccctcaaccgcaacggcctccacttgccatcttactcaccttatccccaaatgatcattgtcgttcaaggtgcgtaatattagtaagaagtatttatcagcttaacgtgataacaataatagtaatatgaaatatttattaaatttttataattaatctctgctagaaaatttgattaatcattttagtagaatttgttttctcaactaggttttaaaacacca

SEQ ID NO: 5817 - DNA, 570 bp, Artificial
  Mutations within GlyA3B4 introduced by GmGlyA3B4_T03TALE nuclease
gttcatgtacggttgcagatataaacgaagcatagcttatgtatgaggtgtaacaaaattggaaacaatagccatgcaaggtgaagaatgtcaccaactcagaaacccttcttcattgacgtgtccctcactcactctcctctcttcactataaatcgccactcttcgtgttctccacttcaccaactccttcaaacttattaacactttccttagttcaatatggggaagcccttcttcactctctctctttcttccctttgcttgctactcttgagtccgaaggtggtcttattgaaacatggaactctcaacaccctgagctgcaatgcgccggtgtcactgtttccaaacgcaccctcaaccgcaacggcctccacttgccatcttactcaccttatccccaaatgatcattgtcgttcaaggtgcgtaatattagtaagaagtatttatcagcttaacgtgataacaataatagtaatatgaaatatttattaaattttttataattaatctctgctagaaaatttgattaatcattttagtagaatttgtttttctcaactagg

SEQ ID NO: 5818 - DNA, 640 bp, Artificial
  Mutations within GlyA3B4 introduced by GmGlyA3B4_T03TALE nuclease
gttcatgtacggttgcagatataaacgaagcatagcttatgtatgaggtgtaacaaaattggaaacaatagccatgcaaggtgaagaatgtcaccaactcagaaacccttcttcattgacgtgtccctcactcactctcctctcttcactataaatcgccactcttcgtgttctccacttcaccaactccttcaaacttattaacactttccttagttcaatatggggaagcccttcttcactctctctctttcttccctttgcttgctactcttgtcgagtgcatgctttgctattacctccacgcgttggaacccgaccaccgcgttgagtccgaaggtggtcttattgaaacatggaactctcaacaccctgagctgcaatgcgccggtgtcactgtttccaaacgcaccctcaaccgcaacggcctccacttgccatcttactcaccttatccccaaatgatcattgtcgttcaaggtgcgtaatattagtaagaagtatttatcagcttaacgtgataacaataatagtaatatgaaatatttattaaattttttataattaatctctgctagaaaatttgattaatcatttttagtagaatttgttttttctcaactaggttttaaacaccaca

SEQ ID NO: 5819 - DNA, 660 bp, Artificial
  Mutations within GlyA3B4 introduced by GmGlyA3B4_T03TALE nuclease
gttcatgtacggttgcagatataaacgaagcatagcttatgtatgaggtgtaacaaaattggaaacaatagccatgcaaggtgaagaatgtcaccaactcagaaacccttcttcattgacgtgtccctcactcactctcctctcttcactataaatcgccactcttcgtgttctccacttcaccaactccttcaaacttattaacactttccttagttcaatatggggaagcccttcttcactctctctctttcttccctttgcttgctactcttgtcgagtgcatgctttgctattacctccagcaacaactcaacaacctcaacgcgttggaacccgaccaccgcgttgagtccgaaggtggtcttattgaaacatggaactctcaacaccctgagctgcaatgcgccggtgtcactgtttccaaacgcaccctcaaccgcaacggcctccacttgccatcttactcaccttatccccaaatgatcattgtcgttcaaggtgcgtaatattagtaagaagtatttatcagcttaacgtgataacaataatagtaatatgaaatatttattaaatttttattaattaatctctgctagaaaatttgattaatcatttttagtagaatttgtttttctcaactaggtttttaaaacacca

SEQ ID NO: 5820 - DNA, 619 bp, Artificial
  Mutations within GlyA3B4 introduced by GmGlyA3B4_T03TALE nuclease
gttcatgtacggttgcagatataaacgaagcatagcttatgtatgaggtgtaacaaaattggaaacaatagccatgcaaggtgaagaatgtcaccaactcagaaacccttcttcattgacgtgtccctcactcactctcctctcttcactataaatcgccactcttcgtgttctccacttcaccaactccttcaaacttattaacactttccttagttcaatatggggaagcccttcttcactctctctctttcttccctttgcttgctactcttgtcgagtgccaactcaacaacctcaacgcgttggaacccgaccaccgcgttgagtccgaaggtggtcttattgaaacatggaactctcaacaccctgagctgcaatgcgccggtgtcactgtttccaaacgcaccctcaaccgcaacggcctccacttgccatcttactcaccttatcccccaaatgatcattgtcgttcaaggtgcgtaatattagtaagaagtatttatcagcttaacgtgataacaataatagtaatatgaaatatttattaaattttttataattaatctctgctagaaaatttgattaatcatttttagtagaatttgtttttctcaac

SEQ ID NO: 5821 - DNA, 615 bp, Artificial
  Mutations within GlyA3B4 introduced by GmGlyA3B4_T03TALE nuclease
gttcatgtacggttgcagatataaacgaagcatagcttatgtatgaggtgtaacaaaattggaaacaatagccatgcaaggtgaagaatgtcaccaactcagaaacccttcttcattgacgtgtccctcactcactctcctctcttcactataaatcgccactcttcgtgttctccacttcaccaactccttcaaacttattaacactttccttagttcaatatggggaagcccttcttcactctctctctttcttccctttgcttgctactcttgtcgagtgcatgctttgctattacctccagcaagccaactcaacaacctcaacgcgttggaacccgaccaccgcgttgagtccgaaggtggtcttattgaaacatggaactctcaacaccctgagctgcaatgcgccggtgtcactgtttccaaacgcaccctcaaccgcaacggcctccacttgccatcttactcaccttatccccaaatgatcattgtcgttcaaggtgcgtaatattagtaagaagtatttatcagcttaacgtgataacaatatagtaatatgaaatatttattaaatttttataattaatctctgctagaaaatttgattaatca

SEQ ID NO: 5822 - DNA, 633 bp, Artificial; identical to SEQ ID NO: 5539
  Mutations within GlyA3B4 introduced by GmGlyA3B4_T03TALE nuclease

SEQ ID NO: 5823 - DNA, 622 bp, Artificial; identical to SEQ ID NO: 5586
  Mutations within GlyA3B4 introduced by GmGlyA3B4_T03TALE nuclease

SEQ ID NO: 5824 - DNA, 652 bp, Artificial
  Mutations within GlyA3B4 introduced by GmGlyA3B4_T03TALE nuclease
gttcatgtacggttgcagatataaacgaagcatagcttatgtaatgaggtgtaacaaaaatttggaaacaatagccatgcaaaggtgaagaatgtcaccaactcagaaacccttcttcattgacgtgtccctcactcactctcctctcttcactataaatcgccactcttcgtgttctccacttcaccaactccttcaaacttattaacactttccttagttcaatatgggggaagcccttcttgcactctctctctttcttccctttgcttgctactcttgtcgagtgcatgctttgctattacctccagcaagttcagtgccaactcaacaacctcaacgcgttggaacccgaccaccgcgttgagtccgaaggtggtcttattgaaacatggaactctcaacaccctgagctgcaatgcgccggtgtcactgtttccaaacgcaccctcaaccgcaacggcctccacttgccatcttactcaccttatccccaaatgatcattgtcgttcaaggtgcgtaatattagtaagaagtatttatcagcttaacgtgataacaatatagtaatatgaaatatttattaaatttttataattaatctctgctagaaaatttgattaatcattttagtagaatttgttttctcaa

SEQ ID NO: 5825 - DNA, 583 bp, Artificial
  Mutations within GlyA3B4 introduced by GmGlyA3B4_T03TALE nuclease
gttcatgtacggttgcagatataaacgaagcatagcttatgtatgaggtgtaacaaaattggaaacaatagccatgcaaggtgaagaatgtcaccaactcagaaacccttcttcattgacgtgtccctcactcactctcctctcttcactataaatcgccactcttcgtgttctccacttcaccaactccttcaaacttattaacactttccttagttcaatatggggaagcccttcttcactctctctctttcttccctttgcttgctactcttattgagagagagtccgaaggtggtcttattgaaacatggaactctcaacaccctgagctgcaatgcgccggtgtcactgtttccaaacgcaccctcaaccgcaacggcctccacttgccatcttactcaccttatccccaaatgatcattgtcgttcaaggtgcgtaatattagtaagaagtatttatcagcttaacgtgataacaataatagtaatatgaaatatttattaaatttttttataattaatctctgctagaaaattttgattaatcatttttagtagaatttgttttttctcaactagg

SEQ ID NO: 5826 - DNA, 635 bp, Artificial
  Mutations within GlyA3B4 introduced by GmGlyA3B4_T03TALE nuclease
gttcatgtacggttgcagatataaacgaagcatagcttatgtatgaggtgtaacaaaattggaaacaatagccatgcaaggtgaagaatgtcaccaactcagaaacccttcttcattgacgtgtccctcactcactctcctctcttcactataaatcgccactcttcgtgttctccacttcaccaactccttcaaacttattaacactttccttagttcaatatggggaagcccttcttcactctctctctttcttccctttgcttgctactcttgtcgagtgcatgcttttgctattacctccagcaagagtgccaactcaacaacctcaacgcgttggaacccgaccaccgcgttgagtccgaaggtggtcttattgaacatggaactctcaacaccctgagctgcaatgcgccggtgtcactgtttccaaacgcaccctcaaccgcaacggcctccacttgccatcttactcaccttatccccaaatgatcattgtcgttcaaggtgcgtaatattagtaagaagtatttatcagcttaacgtgataacaataatagtaatatgaaatatttattaaatttttataattaatctctgctagaaaatttgattaatcattttagtagaatttg

SEQ ID NO: 5827 - DNA, 663 bp, Artificial
  Mutations within GlyA3B4 introduced by GmGlyA3B4_T03TALE nuclease
  misc_feature (533): n is a or c or t or g
gttcatgtacggttgcagatataaacgaagcatagcttatgtatgaggtgtaacaaaattggaaacaatagccatgcaaggtgaagaatgtcaccaactcagaaacccttcttcattgacgtgtccctcactcactctcctctcttcactataaatcgccactcttcgtgttctccacttcaccaactccttcaaacttattaacactttccttagttcaatatgggggaagcccttcttcactctctctctttcttccctttgcttgctactcttgtcgagtgcatgctttgctattacctccagcaagttcgagtgccaactcaacaacctcaacgcgttggaacccgaccaccgcgttgagtccgaaggtggtcttattgaaacatggaactctcaacaccctgagctgcaatgcgccggtgtcactgtttccaaacgcaccctcaaccgcaacggcctccacttgccatcttactcaccttatccccaaatgatcattgtcgttcaaggtgcgtaatattagtaagagnatttatcagcttaacgtgatacaatatagtaatatgaaatatttattaaatttttataattaatctctgctagaaaatttgattaatcattttagtagaatttgttttctcaactaggttttaaacacca

SEQ ID NO: 5828 - DNA, 647 bp, Artificial
  Mutations within GlyA3B4 introduced by GmGlyA3B4_T03TALE nuclease
gttcatgtacggttgcagatataaacgaagcatagcttatgtatgaggtgtaacaaaattggaaacaatagccatgcaaggtgaagaatgtcaccaactcagaaacccttcttcattgacgtgtccctcactcactctcctctcttcactataaatcgccactcttcgtgttctccacttcaccaactccttcaaacttattaacactttccttagttcaatatggggaagcccttcttcactctctctctttcttccctttgcttgctactcttgtcgagtgcatgctttgctattacctccagcaagttctgccaactcaacaacctcaacgcgttggaacccgaccaccgcgttgagtccgaaggtggtcttattgaaacatggaactctcaacaccctgagctgcaatgcgccggtgtcactgtttccaaacgcaccctcaaccgcaacggcctccacttgccatcttactcaccttatccccaaatgatcattgtcgttcaaggtgcgtaatattagtaagaagtatttatcagcttaacgtgataacaataatagtaatatgaaatatttattaaatttttataattaatctctgctagaaaatttgattaatcatttttagtagaatttgtttttctcaa

SEQ ID NO: 5829 - DNA, 647 bp, Artificial; identical to SEQ ID NO: 5103
  Mutations within GlyA3B4 introduced by GmGlyA3B4_T03TALE nuclease

SEQ ID NO: 5830 - DNA, 636 bp, Artificial; identical to SEQ ID NO: 5104
  Mutations within GlyA3B4 introduced by GmGlyA3B4_T03TALE nuclease

SEQ ID NO: 5831 - DNA, 666 bp, Artificial
  Mutations within GlyA3B4 introduced by GmGlyA3B4_T03TALE nuclease
gttcatgtacggttgcagatataaacgaagcatagcttatgtatgaggtgtaacaaaattggaaacaatagccatgcaaggtgaagaatgtcaccaactcagaaacccttcttcattgacgtgtccctcactcactctcctctcttcactataaatcgccactcttcgtgttctccacttcaccaactccttcaaacttattaacactttccttagttcaatatggggaagcccttcttcactctctctctttcttccctttgcttgctactcttgtcgagtgcatgctttgctattacctccagcaaacgagtgccaactcaacaacctcaacgcgttggaacccgaccaccgcgttgagtccgaaggtggtcttattgaaacatggaactctcaacaccctgagctgcaatgcgccggtgtcactgtttccaaacgcaccctcaaccgcaacggcctccacttgccatcttactcaccttatccccaaatgatcattgtcgttcaaggtgcgtaatattagtaagaagtatttatcagcttaacgtgataacaataatagtaatatgaaatatttattaaatttttataattaatctctgctagaaaatttgattaatcattttagtagaatttgtttttctcaactaggtttttaaaacacca

SEQ ID NO: 5832 - DNA, 440 bp, Artificial; identical to SEQ ID NO: 5378
  Mutations within GlyA3B4 introduced by GmGlyA3B4_T03TALE nuclease

SEQ ID NO: 5833 - DNA, 659 bp, Artificial
  Mutations within GlyA3B4 introduced by GmGlyA3B4_T03TALE nuclease
gttcatgtacggttgcagatataaacgaagcatagcttatgtatgaggtgtaacaaaattggaaacaatagccatgcaaggtgaagaatgtcaccaactcagaaacccttcttcattgacgtgtccctcactcactctcctctcttcactataaatcgccactcttcgtgttctccacttcaccaactccttcaaacttattaacactttccttagttcaatatggggaagcccttcttcactctctctctttcttccctttgcttgctactcttgtcgagtgcatgctttgctattacctccagcaagtagtgccaactcaacaacctcaacgcgttggaacccgaccaccgcgttgagtccgaaggtggtcttattgaaacatggaactctcaacaccctgagctgcaatgcgccggtgtcactgtttccaaacgcaccctcaaccgcaacggcctccacttgccatcttactcaccttatccccaaatgatcattgtcgttcaaggtgcgtaatattagtaagaagtatttatcagcttaacgtgataacaataatagtaatatgaaatatttattaaatttttataatttaatctctgctagaaaatttgattaatcattttagtagaatttgttttctcaactaggttttaaaa

SEQ ID NO: 5834 - DNA, 773 bp, Artificial
  Mutations within GlyA3B4 introduced by GmGlyA3B4_T03TALE nuclease
gttcatgtacggttgcagatataaacgaagcatagcttatgtatgaggtgtaacaaaattggaaacaatagccatgcaaggtgaagaatgtcaccaactcagaaacccttcttcattgacgtgtccctcactcactctcctctcttcactataaatcgccactcttcgtgttctccacttcaccaactccttcaaacttattaacactttccttagttcaatatggggaagcccttcttcactctctctctttcttccctttgcttgctactcttgtcgagtgcatgctttgctattacctccagcaagttcaaccatcgccagcaatggcggtggcaagcaggcgctggagacggtccagcggctgttgccggtgctgtgccaggcccacggcttgaccccccagcaggtggtggccaagtgccaactcaacacctcaacgcgttggaacccgaccaccgcgttgagtccgaaggtggtcttattgaaacatggaactctcaacaccctgagctgcaatgcgccggtgtcactgtttccaaacgcacctcaaccgcaacggcctccacttgccatcttactcaccttatccccaaatgatcattgtcgttcaaggtgcgtaatattagtaagaagtatttatcgcttaacgtgataacaataatagtaatatgaaaatatttattaaattttttataattaatctctgctagaaaatttgattaatcaatttttagtagaattttgtttttctcaactaggtttaaacacca

SEQ ID NO: 5835 - DNA, 647 bp, Artificial
  Mutations within GlyA3B4 introduced by GmGlyA3B4_T03TALE nuclease
gttcatgtacggttgcagatataaacgaagcatagcttatgtatgaggtgtaacaaaattggaaacaatagccatgcaaggtgaagaatgtcaccaactcagaaacccttcttcattgacgtgtccctcactcactctcctctcttcactataaatcgccactcttcgtgttctccacttcaccaactccttcaaacttattaacactttccttagttcaatatggggaagcccttcttcactctctctctttcttccctttgcttgctactcttgtcgagtgcatgctttgctattacctccagcagtgccaactcaacaacctcaacgcgttggaacccgaccaccgcgttgagtccgaaggtggtcttattgaaacatggaactctcaacaccctgagctgcaatgcgccggtgtcactgtttccaaacgcaccctcaaccgcaacggcctccacttgccatcttactcaccttatccccaaatgatcattgtcgttcaaggtgcgtaatattagtaagaagtatttatcagcttaacgtgataacaataatagtaatatgaaatatttattaaatttttataattaatctctgctagaaaatttgattaatcattttagtagaatttgtttttctcaactagg

SEQ ID NO: 5836 - DNA, 664 bp, Artificial
  Mutations within GlyA3B4 introduced by GmGlyA3B4_T03TALE nuclease
gttcatgtacggttgcagatataaacgaagcatagcttatgtatgaggtgtaacaaaaattggaaacaatagccatgcaaggtgaagaatgtcaccaactcagaaacccttcttcattgacgtgtccctcactcactctcctctcttcactataaatcgccactcttcgtgttctccacttcaccaactccttcaaacttattaacactttccttagttcaatatggggaagcccttcttcactctctctctttcttccctttgcttgctactcttgtcgagtgcatgctttgctattacctccagcaagttcagtgccaactcaacaacctcaacgcgttggaacccgaccaccgcgttgagtccgaaggtggtcttattgaaacatggaactctcaacaccctgagctgcaatgcgccggtgtcactgtttccaaacgcaccctcaaccgcaacggcctccacttgccatcttactcaccttatccccaaatgatcattgtcgttcaaggtgcgtaatattagtaagaagtatttatcagcttaacgtgataacaatatagtaatatgaaatatttattaaatttttataattaatctctgctagaaaatttgattaatcattttagtagaatttgttttctcaactaggttttaaacacca

SEQ ID NO: 5837 - DNA, 637 bp, Artificial
  Mutations within GlyA3B4 introduced by GmGlyA3B4_T03TALE nuclease
gttcatgtacggttgcagatataaacgaagcatagcttatgtatgaggtgtaacaaaattggaaacaatagccatgcaaggtgaagaatgtcaccaactcagaaacccttcttcattgacgtgtccctcactcactctcctctcttcactataaatcgccactcttcgtgttctccacttcaccaactccttcaaacttattaacactttccttagttcaatatggggaagcccttcttcactctctctctttcttccctttgcttgctactcttgtcgagtgcatgctttgctattacctccagcaagttcaagtgccaactcaacaacctcaacgcgttggaacccgaccaccgcgttgagtccgaaggtggtcttattgaaacatggaactctcaacaccctgagctgcaatgcgccggtgtcactgtttccaaacgcaccctcaaccgcaacggcctccacttgccatcttactcaccttatccccaaatgatcattgtcgttcaaggtgcgtaatattagtaagaagtatttatcagcttaacgtgataacaatatagtaatatgaaatatttattaaatttttataattaatctctgctagaaaatttgattaatcattttagtagaattt

SEQ ID NO: 5838 - DNA, 601 bp, Artificial
  Mutations within GlyA3B4 introduced by GmGlyA3B4_T03TALE nuclease
gttcatgtacggttgcagatataaacgaagcatagcttatgtatgaggtgtaacaaaattggaaacaatagccatgcaaggtgaagaatgtcaccaactcagaaacccttcttcattgacgtgtccctcactcactctcctctcttcactataaatcgccactcttcgtgttctccacttcaccaactccttcaaacttattaacactttccttagttcaatatggggaagcccttcttcactctctctctttcttccctttgcttgctactcttgtcgagtgcatgctttgctattacctccagcaagttgagtccgaaggtggtcttattgaaacatggaactctcaacaccctgagctgcaatgcgccggtgtcactgtttccaaacgcaccctcaaccgcaacggcctccacttgccatcttactcaccttatccccaaatgatcattgtcgttcaaggtgcgtaatattagtaagaagtatttatcagcttaacgtgataacaataatagtaatatgaatatttattaatttttataattaatctctgctagaaatttgattaatcatttttagtagaatttgtttttctcaacta

SEQ ID NO: 5839 - DNA, 637 bp, Artificial; identical to SEQ ID NO: 5203
  Mutations within GlyA3B4 introduced by GmGlyA3B4_T03TALE nuclease

SEQ ID NO: 5840 - DNA, 670 bp, Artificial
  Mutations within GlyA3B4 introduced by GmGlyA3B4_T03TALE nuclease
gttcatgtacggttgcagatataaacgaagcatagcttatgtatgaggtgtaacaaaattggaaacaatagccatgcaaggtgaagaatgtcaccaactcagaaacccttcttcattgacgtgtccctcactcactctcctctcttcactataaatcgccactcttcgtgttctccacttcaccaactccttcaaacttattaacactttccttagttcaatatggggaagcccttcttcactctctctctttcttccctttgcttgctactcttgtcgagtgcatgctttgctattacctccagcaagttcaaagtgccaactcaacaacctcaacgcgttggaacccgaccaccgcgttgagtccgaaggtggtcttattgaaacatggaactctcaacaccctgagctgcaatgcgccggtgtcactgtttccaaacgcaccctcaaccgcaacggcctccacttgccatcttactcaccttatccccaaatgatcattgtcgttcaaggtgcgtaatattagtaagaagtatttatcagcttaacgtgataacaataatagtaatatgaaatatttattaaatttttataattaatctctgctagaaaatttgattaatcattttagtagaatttgtttttctcaactaggttttaaaacaccaca

SEQ ID NO: 5841 - DNA, 621 bp, Artificial
  Mutations within GlyA3B4 introduced by GmGlyA3B4_T03TALE nuclease
gttcatgtacggttgcagatataaacgaagcatagcttatgtatgaggtgtaacaaaattggaaacaatagccatgcaaggtgaagaatgtcaccaactcagaaacccttcttcattgacgtgtccctcactcactctcctctcttcactataaatcgccactcttcgtgttctccacttcaccaactccttcaaacttattaacactttccttagttcaatatggggaagcccttcttcactctctctctttcttccctttgcttgctactcttgtcgagtgcatgctttgctattacctccagcaagaagtgccaactcaacaacctcaacgcgttggaacccgaccaccgcgttgagtccgaaggtggtcttattgaaacatggaactctcaacaccctgagctgcaatgcgccggtgtcactgtttccaaacgcaccctcaaccgcaacggcctccacttgccatcttactcaccttatccccaaatgatcattgtcgttcaaggtgcgtaatattagtaagaagtatttatcagcttaacgtgataacaataatagtaatatgaaatatttattaaatttttataattaatctctgctagaaaatttgattaatca

SEQ ID NO: 5842 - DNA, 474 bp, Artificial
  Mutations within GlyA3B4 introduced by GmGlyA3B4_T03TALE nuclease
gttcatgtacggttgcagatataaacgaagcatagcttatgtatgaggtgtaacaaaattggaaacaatagccatgcaaggtgaagaatgtcaccaactcagaaaccccttcttcattgacgtgtccctcactcactctcctctcttcactataaatcgccactcttcgtgttctccacttcaccaactccttcaaacttattaacactttccttagttcaatatggggaagcccttcttcactctctctctttcttccctttgcttgctactcttgtcgagtgcatgctttgctattacctccagcaagttcgtgctggacaaacaacctcaacgcgttggaacccgaccaccgcgttgagtccgaaggtggtcttattgaaacatggaactctcaacaccctgagctgcaatgcgccggtgtcactgtttccaaacgcaccctcaaccgcaacggcctccacttgccatctt

SEQ ID NO: 5843 - DNA, 663 bp, Artificial; identical to SEQ ID NO: 4922
  Mutations within GlyA3B4 introduced by GmGlyA3B4_T03TALE nuclease

SEQ ID NO: 5844 - DNA, 659 bp, Artificial
  Mutations within GlyA3B4 introduced by GmGlyA3B4_T03TALE nuclease
gttcatgtacggttgcagatataaacgaagcatagcttatgtatgaggtgtaacaaaattggaaacaatagccatgcaaggtgaagaatgtcaccaactcagaaacccttcttcattgacgtgtccctcactcactctcctctcttcactataaatcgccactcttcgtgttctccacttcaccaactccttcaaacttattaacactttccttagttcaatatggggaagcccttcttcactctctctctttcttccctttgcttgctactcttgtcgagtgcatgctttgctattacctccagcaagttcagtgccaactcaacaacctcaacgcgttggaacccgaccaccgcgttgagtccgaaggtggtcttattgaaacatggaactctcaacaccctgagctgcaatgcgccggtgtcactgtttccaaacgcaccctcaaccgcaacggcctccacttgccatcttactcaccttatccccaaatgatcattgtcgttcaaggtgcgtaatattagtaagaagtatttatcagcttaacgtgataacaatatagtaatatgaaatatttattaaatttttataattaatctctgctagaaaatttgattaatcattttagtagaatttgttttctcaactaggttttaaaa

SEQ ID NO: 5845 - DNA, 656 bp, Artificial
  Mutations within GlyA3B4 introduced by GmGlyA3B4_T03TALE nuclease
gttcatgtacggttgcagatataaacgaagcatagcttatgtatgaggtgtaacaaaattggaaacaatagccatgcaaggtgaagaatgtcaccaactcagaaacccttcttcattgacgtgtccctcactcactctcctctcttcactataaatcgccactcttcgtgttctccacttcaccaactccttcaaacttattaacactttccttagttcaatatggggaagcccttcttcactctctctctttcttccctttgcttgctactcttgtcgagtgcatgctttgctattacctccagcaaactcaacaacctcaacgcgttggaacccgaccaccgcgttgagtccgaaggtggtcttattgaaacatggaactctcaacaccctgagctgcaatgcgccggtgtcactgtttccaaacgcaccctcaaccgcaacggcctccacttgccatcttactcaccttatccccaaatgatcattgtcgttcaaggtgcgtaatattagtaagaagtatttatcagcttaacgtgataacaataatagtaatatgaaatatttattaaatttttataattaatctctgctagaaaatttgattaatcattttagtagaatttgtttttctcaactaggtttttaaaacacca

SEQ ID NO: 5846 - DNA, 485 bp, Artificial
  Mutations within GlyA3B4 introduced by GmGlyA3B4_T03TALE nuclease
gttcatgtacggttgcagatataaacgaagcatagcttatgtatgaggtgtaacaaaattggaaacaatagccatgcaaggtgaagaatgtcaccaactcagaaacccttcttcattgacgtgtccctcactcactctcctctcttcactataaatcgccactcttcgtgttctccacttcaccaactccttcaaacttattaacactttccttagttcaatatggggaagcccttcttcactctctctctttcttccctcaaccgcaacggcctccacttgccatcttactcaccttatccccaaatgatcattgtccgttcaaggtgcgtaatattagtaagaagtatttatcagcttaacgtgataacaataatagtaatatgaaatatttattaaatttttttataattaatctctgctagaaaatttgattaatcatttttagtagaatttgtttttctcaactaggtttttaaacacca

SEQ ID NO: 5847 - DNA, 620 bp, Artificial; identical to SEQ ID NO: 5246
  Mutations within GlyA3B4 introduced by GmGlyA3B4_T03TALE nuclease

SEQ ID NO: 5848 - DNA, 647 bp, Artificial
  Mutations within GlyA3B4 introduced by GmGlyA3B4_T03TALE nuclease
gttcatgtacggttgcagatataaacgaagcatagcttatgtatgaggtgtaacaaaattggaaacaatagccatgcaaggtgaagaatgtcaccaactcagaaacccttcttcattgacgtgtccctcactcactctcctctcttcactataaatcgccactcttcgtgttctccacttcaccaactccttcaaacttattaacactttccttagttcaatatggggaagcccttcttcactctctctctttcttccctttgcttgctactcttgtcgagtgcatgctttgctattacctccagcaagttcaaccaactcaacaacctcaacgcgttggaacccgaccaccgcgttgagtccgaaggtggtcttattgaaacatggaactctcaacaccctgagctgcaatgcgccggtgtcactgtttccaaacgcaccctcaaccgcaacggcctccacttgccatcttactcaccttatccccaaatgatcattgtcgttcaaggtgcgtaatattagtaagaagtatttatcagcttaacgtgataacaataatagtaatatgaaatatttattaaatttttataattaatctctgctagaaaatttgattaatcattttagtagaatttgttttctcaatc

SEQ ID NO: 5849 - DNA, 663 bp, Artificial
  Mutations within GlyA3B4 introduced by GmGlyA3B4_T03TALE nuclease
gttcatgtacggttgcagatataaacgaagcatagcttatgtatgaggtgtaacaaaattggaaacaatagccatgcaaggtgaagaatgtcaccaactcagaaacccttcttcattgacgtgtccctcactcactctcctctcttcactataaatcgccactcttcgtgttctccacttcaccaactccttcaaacttattaacactttccttagttcaatatggggaagcccttcttcactctctctctttcttccctttgcttgctactcttgtcgagtgcatgctttgctattacctccagcaagttcaacccaactcaacaacctcaacgcgttggaacccgaccaccgcgttgagtccgaaggtggtcttattgaaacatggaactctcaacaccctgagctgcaatgcgccggtgtcactgtttccaaacgcaccctcaaccgcaacggcctccacttgccatcttactcaccttatccccaaatgatcattgtcgttcaaggtgcgtaatattagtaagaagtatttatcagcttaacgtgataacaatatagtaatatgaaatatttattaaatttttataattaatctctgctagaaaatttgattaatcatttttagtagaatttgtttttctcaactaggtttttaaaaca

SEQ ID NO: 5850 - DNA, 527 bp, Artificial
  Mutations within GlyA3B4 introduced by GmGlyA3B4_T03TALE nuclease
gttcatgtacggttgcagatataaacgaagcatagcttatgtatgaggtgtaacaaaattggaaacaatagccatgcaaggtgaagaatgtcaccaactcagaaacccttcttcattgacgtgtccctcactcactctcctctcttcactataaatcgccactcttcgtgttctccacttcaccaactccttcaaacttattaacactttccttagttcaatatggggaagcccttcttcactctctctctttcttccctttgcttgctactcttgtcgagtgcatgctttgctattacctccagcaagtagtgccaactcaacaacctcaacgcgttggaaacccgaccaccgcgttgagtccgaaggtggtcttattgaaacatggaactctcaacaccctgagctgcaatgcgccggtgtcactgtttccaaaacgcaccctcaaccgcaacggcctccacttgccatcttactcaccttatccccaaaatgatcattgtcgttcaaaggtgcgtaatattagt

SEQ ID NO: 5851 - DNA, 643 bp, Artificial; identical to SEQ ID NO: 5406
  Mutations within GlyA3B4 introduced by GmGlyA3B4_T03TALE nuclease

SEQ ID NO: 5852 - DNA, 666 bp, Artificial
  Mutations within GlyA3B4 introduced by GmGlyA3B4_T03TALE nuclease
gttcatgtacggttgcagatataaacgaagcatagcttatgtatgaggtgtaacaaaattggaaacaatagccatgcaaggtgaagaatgtcaccaactcagaaacccttcttcattgacgtgtccctcactcactctcctctcttcactataaatcgccactcttcgtgttctccacttcaccaactccttcaaacttattaacactttccttagttcaatatggggaagcccttcttcactctctctctttcttccctttgcttgctactcttgtcgagtgcatgctttgctattacctccagcaagttcgagtgccaactcaacaacctcaacgcgttggaacccgaccaccgcgttgagtccgaaggtggtcttattgaaacatggaactctcaacaccctgagctgcaatgcgccggtgtcactgtttccaaacgcaccctcaaccgcaacggcctccacttgccatcttactcaccttatccccaaatgatcattgtcgttcaaggtgcgtaatattagtaagagtatttatcagcttaacgtgataacaatatagtaatatgaaatatttattaaatttttataattaatctctgctagaaaatttgattaatcattttagtagaatttgtttttctcaactaggtttttaaaacacca

SEQ ID NO: 5853 - DNA, 482 bp, Artificial
  Mutations within GlyA3B4 introduced by GmGlyA3B4_T03TALE nuclease
gttcatgtacggttgcagatataaacgaagcatagcttatgtatgaggtgtaacaaaattggaaacaatagccatgcaaggtgaagaatgtcaccaactcagaaacccttcttcattgacgtgtccctcactcactctcctctcttcactataaatcgccactcttcgtgttctccacttcaccaactccttcaaacttattaacactttccttagttcaatatggggaagcccttcttcactctctctctttcttccctttgcttgctactcttgtcgagtgcatgctttgctattacctccagcaaacgcacctcaacgcaacgcctccacttgccatcttactcaccttatccccaaatgatcttgtcgttcaaggtgcgtaatattagtaagaagtatttatcagcttacgtgataacaataatagtaatatgaaatatttattaaattttttataattaatctctgctagaaaattt

SEQ ID NO: 5854 - DNA, 659 bp, Artificial; identical to SEQ ID NO: 4859
  Mutations within GlyA3B4 introduced by GmGlyA3B4_T03TALE nuclease

SEQ ID NO: 5855 - DNA, 664 bp, Artificial
  Mutations within GlyA3B4 introduced by GmGlyA3B4_T03TALE nuclease
gttcatgtacggttgcagatataaacgaagcatagcttatgtatgaggtgtaacaaaattggaaacaatagccatgcaaggtgaagaatgtcaccaactcagaaacccttcttcattgacgtgtccctcactcactctcctctcttcactataaatcgccactcttcgtgttctccacttcaccaactccttcaaacttattaacactttccttagttcaatatggggaagcccttcttcactctctctctttcttccctttgcttgctactcttgtcgagtgcatgctttgctattacctccagcaagttcaacgcgttggaacccgaccaccgcgttggaacccgaccaccgcgttgagtccgaaggtggtcttattgaaacatggaactctcaacaccctgagctgcaatgcgccggtgtcactgtttccaaacgcaccctcaaccgcaacggcctccacttgccatcttactcaccttatccccaaatgatcattgtcgttcaaggtgcgtaatattagtaagagtatttatcagcttaacgtgataacaatatagtaatatgaaatatttattaaatttttataattaatctctgctagaaaatttgattaatcatttttagtagaatttgtttttctcaactaggtttttaaacacca

SEQ ID NO: 5856 - DNA, 666 bp, Artificial
  Mutations within GlyA3B4 introduced by GmGlyA3B4_T03TALE nuclease
gttcatgtacggttgcagatataaacgaagcatagcttatgtatgaggtgtaacaaaattggaaacaatagccatgcaaggtgaagaatgtcaccaactcagaaacccttcttcattgacgtgtccctcactcactctcctctcttcactataaatcgccactcttcgtgttctccacttcaccaactccttcaaacttattaacactttccttagttcaatatggggaagcccttcttcactctctctctttcttccctttgcttgctactcttgtcgagtgcatgctttgctattacctccagcaagttcaacaactcaacaacctcaacgcgttggaacccgaccaccgcgttgagtccgaaggtggtcttattgaaacatggaactctcaacaccctgagctgcaatgcgccggtgtcactgtttccaaacgcaccctcaaccgcaacggcctccacttgccatcttactcaccttatccccaaatgatcattgtcgttcaaggtgcgtaatattagtaagaagtatttatcagcttaacgtgataacaataatagtaatatgaaatatttattaaatttttataattaatctctgctagaaaatttgattaatcatttttagtagaatttgtttttctcaactaggtttttaaaacaccaa

SEQ ID NO: 5857 - DNA, 499 bp, Artificial; identical to SEQ ID NO: 4828
  Mutations within GlyA3B4 introduced by GmGlyA3B4_T03TALE nuclease

SEQ ID NO: 5858 - DNA, 600 bp, Artificial
  Mutations within GlyA3B4 introduced by GmGlyA3B4_T03TALE nuclease
gttcatgtacggttgcagatataaacgaagcatagcttatgtatgaggtgtaacaaaattggaaacaatagccatgcaaggtgaagaatgtcaccaactcagaaacccttcttcattgacgtgtccctcactcactctcctctcttcactataaatcgccactcttcgtgttctccacttcaccaactccttcaaacttattaacactttccttagttcaatatggggaagcccttcttcactctctctctttcttccctttgcttgctactcttgtcgagtgccaactcaacaacctcaacgcgttggaacccgaccaccgcgttgagtccgaaggtggtcttattgaaacatggaactctcaacaccctgagctgcaatgcgccggtgtcactgtttccaaacgcaccctcaaccgcaacggcctccacttgccatcttactcaccttatccccaaatgatcattgtcgttcaaggtgcgtaatattagtaagaagtatttcatcagcttaacgtgataacaataatagtaatatgaaatatttattaatttttataattaatctctgctagaaaatttgattaatcatttttagtag

SEQ ID NO: 5859 - DNA, 663 bp, Artificial; identical to SEQ ID NO: 4967
  Mutations within GlyA3B4 introduced by GmGlyA3B4_T03TALE nuclease

SEQ ID NO: 5860 - DNA, 663 bp, Artificial; identical to SEQ ID NO: 5285
  Mutations within GlyA3B4 introduced by GmGlyA3B4_T03TALE nuclease

SEQ ID NO: 5861 - DNA, 574 bp, Artificial
  Mutations within GlyA3B4 introduced by GmGlyA3B4_T03TALE nuclease
gttcatgtacggttgcagatataaacgaagcatagcttatgtatgaggtgtaacaaaattggaaacaatagccatgcaaggtgaagaatgtcaccaactcagaaacccttcttcattgacgtgtccctcactcactctcctctcttcactataaatcgccactcttcgtgttctccacttcaccaactccttcaaacttattaacactttccttagttcaatatggggaagcccttcttcactctctctctttcttccctttgcttgctactcttgtcgagtgccaactcaacaacctcaacgcgttggaacccgaccaccgcgttgagtccgaaggtggtcttattgaaacatggaaactctcaacaccctgagctgcaatgcgccggtgtcactgtttccaaacgcaccctcaaccgcaacggcctccacttgccatcttactcaccttatccccgaaatgatcattgtcgttcaaggtgcgtaatattagtaagaagtatttatcagcttaacgtgataacaataatagtaatatgaaatatttattaatttttataattaatctctgcta

SEQ ID NO: 5862 - DNA, 652 bp, Artificial
  Mutations within GlyA3B4 introduced by GmGlyA3B4_T03TALE nuclease
gttcatgtacggttgcagatataaacgaagcatagcttatgtatgaggtgtaacaaaattggaaacaatagccatgcaaggtgaagaatgtcaccaactcagaaacccttcttcattgacgtgtccctcactcactctcctctcttcactataaatcgccactcttcgtgttctccacttcaccaactccttcaaacttattaacactttccttagttcaatatggggaagcccttcttcactctctctctttcttccctttgcttgctactcttgtcgagtgcatgctttgctattacctccagcaaacgccaactcaacaacctcaacgcgttggaacccgaccaccgcgttgagtccgaaggtggtcttattgaaacatggaactctcaacaccctgagctgcaatgcgccggtgtcactgtttccaaacgcaccctcaaccgcaacggcctccacttgccatcttactcaccttatccccaaatgatcattgtcgttcaaggtgcgtaatattagtaagaagtatttatcagcttaacgtgataacaataatagtaatatgaaatatttattaaatttttataattaatctctgctagaaaatttgattaatcattttagtagaatttgttttctcaactaggttttt

SEQ ID NO: 5863 - DNA, 651 bp, Artificial
  Mutations within GlyA3B4 introduced by GmGlyA3B4_T03TALE nuclease
gttcatgtacggttgcagatataaacgaagcatagcttatgtatgaggtgtaacaaaattggaaacaatagccatgcaaggtgaagaatgtcaccaactcagaaacccttcttcattgacgtgtccctcactcactctcctctcttcactataaatcgccactcttcgtgttctccacttcaccaactccttcaaacttattaacactttccttagttcaatatggggaagcccttcttcactctctctctttcttccctttgcttgctactcttgtcgagtgcatgctttgctattacctccagcaagttcgagtgccaactcaacaacctcaacgcgttggaacccgaccaccgcgttgagtccgaaggtggtcttattgaaacatggaactctcaacaccctgagctgcaatgcgccggtgtcactgtttccaaacgcaccctcaaccgcaacggcctccacttgccatcttactcaccttatccccaaatgatcattgtcgttcaaggtgcgtaatattagtaagagtatttatcagcttaacgtgataacaatatagtaatatgaaatatttattaaatttttataattaatctctgctagaaaatttgattaatcattttagtagaatttgttttctcaactagg

SEQ ID NO: 5864 - DNA, 621 bp, Artificial
  Mutations within GlyA3B4 introduced by GmGlyA3B4_T03TALE nuclease
gttcatgtacggttgcagatataaacgaagcatagcttatgtatgaggtgtaacaaaattggaaacaatagccatgcaaggtgaagaatgtcaccaactcagaaacccttcttcattgacgtgtccctcactcactctcctctcttcactataaatcgccactcttcgtgttctccacttcaccaactccttcaaacttattaacactttccttagttcaatatggggaagcccttcttcactctctctctttcttccctttgcttgctactcttgtcgagtgcatgctttgctattacctccagcaagttgtgccaactcaacaacctcaacgcgttggaacccgaccaccgcgttgagtccgaaggtggtcttattgaaacatggaactctcaacaccctgagctgcaatgcgccggtgtcactgtttccaaacgcaccctcaaccgcaacggcctccacttgccatcttactcaccttatccccaaatgatcattgtcgttcaaggtgcgtaatattagtaagaagtatttatcagcttaacgtgataacaatatagtaatatgaaatatttattaaatttttataatttaatctctgctagaaaatttgattaatca

SEQ ID NO: 5865 - DNA, 659 bp, Artificial
  Mutations within GlyA3B4 introduced by GmGlyA3B4_T03TALE nuclease
gttcatgtacggttgcagatataaacgaagcatagcttatgtatgaggtgtaacaaaattggaaacaatagccatgcaaggtgaagaatgtcaccaactcagaaacccttcttcattgacgtgtccctcactcactctcctctcttcactataaatcgccactcttcgtgttctccacttcaccaactccttcaaacttattaacactttccttagttcaatatggggaagcccttcttcactctctctctttcttccctttgcttgctactcttgtcgagtgcatgctttgctattacctccagcaagttgagtgccaactcaacaacctcaacgcgttggaacccgaccaccgcgttgagtccgaaggtggtcttattgaaacatggaactctcaacaccctgagctgcaatgcgccggtgtcactgtttccaaacgcaccctcaaccgcaacggcctccacttgccatcttactcaccttatccccaaatgatcattgtcgttcaaggtgcgtaatattagtaagaagtatttatcagcttaacgtgataacaatatagtaatatgaaatatttattaaatttttataattaatctctgctagaaaatttgattaatcattttagtagaatttgttttctcaactaggttttaaaa

SEQ ID NO: 5866 - DNA, 666 bp, Artificial
  Mutations within GlyA3B4 introduced by GmGlyA3B4_T03TALE nuclease
  misc_feature (531): n is a or c or t or g
gttcatgtacggttgcagatataaacgaagcatagcttatgtatgaggtgtaacaaaattggaaacaatagccatgcaaggtgaagaatgtcaccaactcagaaacccttcttcattgacgtgtccctcactcactctcctctcttcactataaatcgccactcttcgtgttctccacttcaccaactccttcaaacttattaacactttccttagttcaatatggggaagcccttcttcactctctctctttcttccctttgcttgctactcttgtcgagtgcatgctttgctattacctccagcaagtcgagtgccaactcaacaacctcaacgcgttggaacccgaccaccgcgttgagtccgaaggtggtcttattgaaacatggaactctcaacaccctgagctgcaatgcgccggtgtcactgtttccaaacgcaccctcaaccgcaacggcctccacttgccatcttactcaccttatccccaaatgatcattgtcgttcaaggtgcgtaatattagtaagagnatttatcagcttaacgtgataacaatatagtaatatgaaatatttattaaatttttataattaatctctgctagaaaatttgattaatcattttagtagaatttgtttttctcaactaggtttttaaacaccaca

SEQ ID NO: 5867 - DNA, 636 bp, Artificial
  Mutations within GlyA3B4 introduced by GmGlyA3B4_T03TALE nuclease
gttcatgtacggttgcagatataaacgaagcatagcttatgtatgaggtgtaacaaaaattggaaacaatagccatgcaaggtgaagaatgtcaccaactcagaaacccttcttcattgacgtgtccctcactcactctcctctcttcactataaatcgccactcttcgtgttctccacttcaccaactccttcaaacttattaacactttccttagttcaatatggggaagcccttcttcactctctctctttcttccctttgcttgctactcttgtcgagtgcatgctttgctattaacgcgttggaacccgaccaccgcgttgagtccgaaggtggtcttattgaaacatggaactctcaacaccctgagctgcaatgcgccggtgtcactgtttccaaacgcaccctcaaccgcaacggcctccacttgccatcttactcaccttatccccaaatgatcattgtcgttcaaggtgcgtaatattagtaagaagtatttatcagcttaacgtgataacaataatagtaatatgaaatatttattaaattttttataattaatctctgctagaaaatttgattaatcatttttagtagaatttgttttttctcaactaggttttaaacaccaca

SEQ ID NO: 5868 - DNA, 683 bp, Artificial
  Mutations within GlyA3B4 introduced by GmGlyA3B4_T03TALE nuclease
gttcatgtacggttgcagatataaacgaagcatagcttatgtatgaggtgtaacaaaattggaaacaatagccatgcaaggtgaagaatgtcaccaactcagaaacccttcttcattgacgtgtccctcactcactctcctctcttcactataaatcgccactcttcgtgttctccacttcaccaactccttcaaacttattaacactttccttagttcaatatggggaagcccttcttcactctctctctttcttccctttgcttgctactcttgtcgagtgcatgctttgctattacctccagcaagttcaacgacgtacgctacatcaaacctcaaacctcagcgcgtttgggaaaccccgacccacccgcgttgagtccgaaggtggtcttattgaaacatggaactctcaacaccctgagctgcaatgcgccggtgtcactgtttccaaacgcaccctcaaccgcaacggcctccacttgccatcttactcaccttatccccaaatgatcattgtcgttcaaggtgcgtaatattagtaagagtatttatcagcttaacgtgataacaataatagtaatatgaaatatttattaaatttttataattaatctctgctagaaaatttgattaatcatttttagtagaatttgtttttctcaactaggttttaaacacca

SEQ ID NO: 5869 - DNA, 658 bp, Artificial
  Mutations within GlyA3B4 introduced by GmGlyA3B4_T03TALE nuclease
gttcatgtacggttgcagatataaacgaagcatagcttatgtatgaggtgtaacaaaattggaaacaatagccatgcaaggtgaagaatgtcaccaactcagaaacccttcttcattgacgtgtccctcactcactctcctctcttcactataaatcgccactcttcgtgttctccacttcaccaactccttcaaacttattaacactttccttagttcaatatggggaagcccttcttcactctctctctttcttccctttgcttgctactcttggatcagaaatatgtgtatctagcttaaaattattcaacaacctcaacgcgttggaacccgaccaccgcgttgagtccgaaggtggtcttattgaaacatggaactctcaacaccctgagctgcaatgcgccggtgtcactgtttccaaacgcaccctcaaccgcaacggcctccacttgccatcttactcaccttatccccaaatgatcattgtcgttcaaggtgcgtaatattagtaagaagtatttatcagcttaacgtgataacaataatagtaatatgaaatatttattaaatttttataattaatctctgctagaaaatttgattaatcatttttagtagaatttgttttttctcaactaggttttaaaacaccaca

SEQ ID NO: 5870 - DNA, 663 bp, Artificial; identical to SEQ ID NO: 4967
  Mutations within GlyA3B4 introduced by GmGlyA3B4_T03TALE nuclease

SEQ ID NO: 5871 - DNA, 648 bp, Artificial
  Mutations within GlyA3B4 introduced by GmGlyA3B4_T03TALE nuclease
gttcatgtacggttgcagatataaacgaagcatagcttatgtatgatggtggtaacaaaaattggaaacaatagcccatgcaaggtgaagaatgtcaccaactcagaaacccttcttcattgacgtgtccctcactcactctcctctcttcactataaatcgccactcttcgtgttcttccacttcaccaaactccttcaaacttattaacactttccttagttcaatatggggaagcccttcttcactctctctctttcttccctttgcttgctactcttgtcgagtgcatgctttgctattacctccagcaagttgagtgccaactcaacaacctcaacgcgttggaacccgaccaccgcagttgagtaccgaaggtggtcttattgaaacatggaactctcaacaccctgagctgcaatgcgccggtgtcactgtttccaaacgcaccctcaaccgcaaccggcctccacttgccatcttactcaccttatcccccaaatgaatcattgtcgttcaaggtgcgtaatattagtaagaagtatttatcagcttaacgtgataacaataatagtaatatgaaaatatttattaaaatttttataaatttaaatctctgctagaaaatttgattaatcattttagtag

SEQ ID NO: 5872 - DNA, 665 bp, Artificial; identical to SEQ ID NO: 4810
  Mutations within GlyA3B4 introduced by GmGlyA3B4_T03TALE nuclease

SEQ ID NO: 5873 - DNA, 623 bp, Artificial
  Mutations within GlyA3B4 introduced by GmGlyA3B4_T03TALE nuclease
gttcatgtacggttgcagatataaacgaagcatagcttatgtaatgaggtgtaacaaaatttggaaacaatagccatgcaaggtgaagaatgtcaccaactcagaaaccccttcttcattgacgtgtccctcactcactctcctctcttcactataaatcgccactcttcgtgttctccacttcaccaactccttcaaacttattaacacctttccttagttcaatatggggaagcccttcttgcactctctctctttcttccctttgcttgctactcttgtcgagtgcatgctttgctattacctccagcaagttcaacgcgagtgcccaactcaacaacctcaacgcgttggaacccgaccaccgcgttgagtccgaaggtggtcttattgaaacatggaactctcaacacccctgagctgcaatgcgccggtgtcactgtttccaaacgcaccctcaaccgcaacggcctccacttgccatcttactcaccttatccccaaatgatcattgtcgttcaaggtgcgtaatattagtaagaagtatttatcagcttaacgtgataacaataatagtaatatgaaatatttattaaaatttttttataattaatctctgctag

SEQ ID NO: 5874 - DNA, 666 bp, Artificial; identical to SEQ ID NO: 4986
  Mutations within GlyA3B4 introduced by GmGlyA3B4_T03TALE nuclease

SEQ ID NO: 5875 - DNA, 579 bp, Artificial
  Mutations within GlyA3B4 introduced by GmGlyA3B4_T03TALE nuclease
gttcatgtacggttgcagatataaacgaagcatagcttatgtatgaggtgtaacaaaattggaaacaatagccatgcaaggtgaagaatgtcaccaactcagaaacccttcttcattgacgtgtccctcactcactctcctctcttcactataaatcgccactcttcgtgttctccacttcaccaactccttcaaacttattaacactttccttagttcaatatggggaagcccttcttcactctctctctttcttccctttgcttccaactcaacaacctcaacgcgttggaacccgaccaccgcgttgagtccgaaggtggtcttattgaaacatggaactctcaacaccctgagctgcaatgcgccggtgtcactgtttccaaacgcaccctcaaccgcaacggcctccacttgccatcttactcaccttatccccaaatgatcattgtcgttcaaggtgcgtaatattagtaagaagtatttatcagcttaacgtgataacaataatagtaatatgaaatatttattaatttttataattaatctctgctagaaaatttgattaatcatttttag

SEQ ID NO: 5876 - DNA, 616 bp, Artificial; identical to SEQ ID NO: 3219
  Mutations within GlyA3B4 introduced by GmGlyA3B4_T03TALE nuclease

SEQ ID NO: 5877 - DNA, 618 bp, Artificial
  Mutations within GlyA3B4 introduced by GmGlyA3B4_T03TALE nuclease
gttcatgtacggttgcagatataaacgaagcatagcttatgtatgaggtgtaacaaaattggaaacaatagccatgcaaggtgaagaatgtcaccaactcagaaacccttcttcattgacgtgtccctcactcactctcctctcttcactataaatcgccactcttcgtgttctccacttcaccaactccttcaaacttattaacactttccttagttcaatatggggaagcccttcttcactctctctctttcttccctttgcttgctactcttgtcgagtgccaactcaacaacctcaacgcgttggaacccgaccaccgcgttgagtcccgaaggtggtcttattgaaacatggaactctcaacaccctgagctgcaatgcgccggtgtcactgtttccaaacgcaccctcaaccgcaacggcctccacttgccatcttactcaccttatccccaaatgatcattgtcgttcaaggtgcgtaatattagtaagaagtatttatcagcttaacgtgataacaataatagtaatatgaaatatttattaattttttataattaatctctgctagaaaatttgattaatcatttttagtagaatttgtttttctcaac

SEQ ID NO: 5878 - DNA, 662 bp, Artificial
  Mutations within GlyA3B4 introduced by GmGlyA3B4_T03TALE nuclease
gttcatgtacggttgcagatataaacgaagcatagcttatgtatgaggtgtaacaaaattggaaacaatagccatgcaaggtgaagaatgtcaccaactcagaaacccttcttcattgacgtgtccctcactcactctcctctcttcactataaatcgccactcttcgtgttctccacttcaccaactccttcaaacttattaacactttccttagttcaatatggggaagcccttcttcactctctctctttcttccctttgcttgctactcttgtcgagtgcatgctttgctattacctccagcaagttgagtgccaactcaacaacctcaacgcgttggaacccgaccaccgcgttgagtccgaaggtggtcttattgaaacatggaactctcaacaccctgagctgcaatgcgccggtgtcactgtttccaaacgcaccctcaaccgcaacggcctccacttgccatcttactcaccttatccccaaatgatcattgtcgttcaaggtgcgtaatattagtaagaagtatttatcagcttaacgtgataacaataatagtaatatgaaatatttattaaatttttataattaatctctgctagaaaatttgattaatcattttagtagaatttgtttttctcaatctaggttttaaaa

SEQ ID NO: 5879 - DNA, 631 bp, Artificial
  Mutations within GlyA3B4 introduced by GmGlyA3B4_T03TALE nuclease
gttcatgtacggttgcagatataaacgaagcatagcttatgtatgaggtgtaacaaaattggaaacaatagccatgcaaggtgaagaatgtcaccaactcagaaacccttcttcattgacgtgtccctcactcactctcctctcttcactataaatcgccactcttcgtgttctccacttcaccaactccttcaaacttattaacactttccttagttcaatatggggaagcccttcttcactctctctctttcttccctttgcttgctactcttgtcgagtgcatgctttgctattacctccagcatgccaactcaacaacctcaacgcgttggaacccgaccaccgcgttgagtccgaaggtggtcttattgaaacatggaactctcaacaccctgagctgcaatgcgccggtgtcactgtttccaaacgcaccctcaaccgcaacggcctccacttgccatcttactcaccttatccccaaatgatcattgtcgttcaaggtgcgtaatattagtaagaagtatttatcagcttaacgtgataacaataatagtaatatgaaatatttattaaatttttataattaatctctgctagaaaatttgattaatcattttagtagaatttg

SEQ ID NO: 5880 - DNA, 557 bp, Artificial
  Mutations within GlyA3B4 introduced by GmGlyA3B4_T03TALE nuclease
gttcatgtacggttgcagatataaacgaagcatagcttatgtatgaggtgtaacaaaattggaaacaatagccatgcaaggtgaagaatgtcaccaactcagaaacccttcttcattgacgtgtccctcactcactctcctctcttcactataaatcgccactcttcgtgttctccacttcaccaactccttcaaacttattaacactttccttagttcaatatggggaagcccttcttcactctctctctttcttccctttgcttgctactcttgtcgagtgcatgctttgctattacctccagcgcgttgagtccgaaggtggtcttattgaaacatggaactctcaacaccctgagctgcaatgcgccggtgtcactgtttccaaacgcaccctcaaccgcaacggcctccacttgccatcttactcaccttatccccaaatgatcattgtcgttcaaggtgcgtaatattagtaagaagtatttatcagcttaacgtgataacaataatagtaatatgaatatttattaatttttataattaatctctgctag

SEQ ID NO: 5881 - DNA, 640 bp, Artificial; identical to SEQ ID NO: 5221
  Mutations within GlyA3B4 introduced by GmGlyA3B4_T03TALE nuclease

SEQ ID NO: 5882 - DNA, 660 bp, Artificial; identical to SEQ ID NO: 4831
  Mutations within GlyA3B4 introduced by GmGlyA3B4_T03TALE nuclease

SEQ ID NO: 5883 - DNA, 669 bp, Artificial
  Mutations within GlyA3B4 introduced by GmGlyA3B4_T03TALE nuclease
gttcatgtacggttgcagatataaacgaagcatagcttatgtatgaggtgtaacaaaattggaaacaatagccatgcaaggtgaagaatgtcaccaactcagaaacccttcttcattgacgtgtccctcactcactctcctctcttcactataaatcgccactcttcgtgttctccacttcaccaactccttcaaacttattaacactttccttagttcaatatggggaagcccttcttcactctctctctttcttccctttgcttgctactcttgtcgagtgcatgctttgctattacctccagcaagttcgagtgccaactcaacaacctcaacgcgttggaacccgaccaccgcgttgagtccgaaggtggtcttattgaaacatggaactctcaacaccctgagctgcaatgcgccggtgtcactgtttccaaacgcaccctcaaccgcaacggcctccacttgccatcttactcaccttatccccaaatgatcattgtcgttcaaggtgcgtaatattagtaagagtatttatcagcttaacgtgataacaataatagtaatatgaaatatttattaaatttttataattaatctctgctagaaaatttgattaatcattttagtagaatttgtttttctcaactaggtttttaaaacaccaca

SEQ ID NO: 5884 - DNA, 645 bp, Artificial
  Mutations within GlyA3B4 introduced by GmGlyA3B4_T03TALE nuclease
gttcatgtacggttgcagatataaacgaagcatagcttatgtatgaggtgtaacaaaattggaaacaatagccatgcaaggtgaagaatgtcaccaactcagaaacccttcttcattgacgtgtccctcactcactctcctctcttcactataaatcgccactcttcgtgttctccacttcaccaactccttcaaacttattaacactttccttagttcaatatggggaagcccttcttcactctctctctttcttccctttgcttgctactcttgtcgagtgcatgctttgctattacctccagcaagtagtgccaactcaacaacctcaacgcgttggaacccgaccaccgcgttgagtccgaaggtggtcttattgaaacatggaactctcaacaccctgagctgcaatgcgccggtgtcactgtttccaaacgcaccctcaaccgcaacggcctccacttgccatcttactcaccttatccccaaatgatcattgtcgttcaaggtgcgtaatattagtaagaagtatttatcagcttaacgtgataacaatatagtaatatgaaatatttattaaatttttataatttaatctctgctagaaaatttgattaatcattttagtagaatttgttttctcaa

SEQ ID NO: 5885 - DNA, 648 bp, Artificial; identical to SEQ ID NO: 5336
  Mutations within GlyA3B4 introduced by GmGlyA3B4_T03TALE nuclease

SEQ ID NO: 5886 - DNA, 656 bp, Artificial
  Mutations within GlyA3B4 introduced by GmGlyA3B4_T03TALE nuclease
gttcatgtacggttgcagatataaacgaagcatagcttatgtatgaggtgtaacaaaattggaaacaatagccatgcaaggtgaagaatgtcaccaactcagaaacccttcttcattgacgtgtccctcactcactctcctctcttcactataaatcgccactcttcgtgttctccacttcaccaactccttcaaacttattaacactttccttagttcaatatggggaagcccttcttcactctctctctttcttccctttgcttgctactcttgtcgagtgcatgctttgctattacctccagcaacctcaacgcgttggaacccgaccaccgcgttggaacccgaccaccgcgttgagtccgaaggtggtcttattgaaacatggaactctcaacaccctgagctgcaatgcgccggtgtcactgtttccaaacgcaccctcaaccgcaacggcctccacttgccatcttactcaccttatccccaaatgatcattgtcgttcaaggtgcgtaatattagtaagaagtatttatcagcttaacgtgataacaataatagtaatatgaaatatttattaaatttttataattaatctctgctagaaaatttgattaatcattttagtagaatttgtttttctcaactaggtttt

SEQ ID NO: 5887 - DNA, 501 bp, Artificial
  Mutations within GlyA3B4 introduced by GmGlyA3B4_T03TALE nuclease
gttcatgtacggttgcagatataaacgaagcatagcttatgtatgaggtgtaacaaaattggaaacaatagccatgcaaggtgaagaatgtcaccaactcagaaacccttcttcattgacgtgtccctcactcactctcctctcttcactataaatcgccactcttcgtgttctccacttcaccgcgttgagtccgaaggtggtcttattgaaacatggaactctcaacaccctgagctgcaatgcgccggtgtcactgtttccaaacgcaccctcaaccgcaacggcctccacttgccatcttactcaccttatcccccaaatgatcattgtcgttcaaggtgcgtaatattagtaagaagtatttatcagcttaacgtgataacaataatagtaatatgaaatattttattaaattttttataattaatctctgctagaaaatttgattaatcatttttagtagaatttgtttttctcaactaggttttaaacaccaca

SEQ ID NO: 5888 - DNA, 634 bp, Artificial; identical to SEQ ID NO: 5321
  Mutations within GlyA3B4 introduced by GmGlyA3B4_T03TALE nuclease

SEQ ID NO: 5889 - DNA, 655 bp, Artificial
  Mutations within GlyA3B4 introduced by GmGlyA3B4_T03TALE nuclease
gttcatgtacggttgcagatataaacgaagcatagcttatgtatgaggtgtaacaaaattggaaacaatagccatgcaaggtgaagaatgtcaccaactcagaaacccttcttcattgacgtgtccctcactcactctcctctcttcactataaatcgccactcttcgtgttctccacttcaccaactccttcaaacttattaacactttccttagttcaatatggggaagcccttcttcactctctctctttcttccctttgcttgctactcttgtcgagtgcatgctttgctattacctccagcaagttcagtgccaactcaacaacctcaacgcgttggaacccgaccaccgcgttgagtccgaaggtggtcttattgaaacatggaactctcaacaccctgagctgcaatgcgccggtgtcactgtttccaaacgcaccctcaaccgcaacggcctccacttgccatcttactcaccttatccccaaatgatcattgtcgttcaaggtgcgtaatattagtaagaagtatttatcagcttaacgtgataacaataatagtaatatgaaatatttattaaatttttataattaatctctgctagaaaatttgattaatcattttagtagaatttgttttctcaactaggttt

SEQ ID NO: 5890 - DNA, 619 bp, Artificial; identical to SEQ ID NO: 5820
  Mutations within GlyA3B4 introduced by GmGlyA3B4_T03TALE nuclease

SEQ ID NO: 5891 - DNA, 623 bp, Artificial; identical to SEQ ID NO: 5308
  Mutations within GlyA3B4 introduced by GmGlyA3B4_T03TALE nuclease

SEQ ID NO: 5892 - DNA, 647 bp, Artificial
  Mutations within GlyA3B4 introduced by GmGlyA3B4_T03TALE nuclease
gttcatgtacggttgcagatataaacgaagcatagcttatgtatgaggtgtaacaaaattggaaacaatagccatgcaaggtgaagaatgtcaccaactcagaaaccccttcttcattgacgtgtccctcactcactctcctctcttcactataaatcgccactcttcgtgttctccacttcaccaactccttcaaacttattaacactttccttagttcaatatggggaagcccttcttcactctctctctttcttccctttgcttgctactcttgtcgagtgcatgctttgctattacctccagcaagttagtgccaactcaacaacctcaacgcgttggaacccgaccaccgcgttgagtccgaaggtggtcttattgaaacatggaactctcaacaccctgagctgcaatgcgccggtgtcactgtttccaaacgcaccctcaaccgcaacggcctccacttgccatcttactcaccttatccccaaatgatcattgtcgttcaaggtgcgtaatattagtaagaagtatttatcagcttaacgtgataacaataatagtaatatgaaatatttattaaatttttataattaatctctgctagaaaatttgattaatcattttagtagaatttgttttctcaa

SEQ ID NO: 5893 - DNA, 488 bp, Artificial
  Mutations within GlyA3B4 introduced by GmGlyA3B4_T03TALE nuclease
gttcatgtacggttgcagatataaacgaagcatagcttatgtaatgaggtgtaacaaaattggaaacaatagccatgcaaggtgaagaatgtcaccaactcagaaaccccttcttcattgacgtgtccctcactcactctcctctcttcaactataaatcgccactcttcgtgttctccacttcaccaactccttcaaacttattaacactttccttagttcaatatgggggaaagcccttcttcactctcctctctttcttccctttgcttgctactcttgtcgagtgcatgctttgctattaccttccccaacagtgccaactcaacaacctcaacgcgttggaacccgaccaccgcgttgagtccgaaggtggtcttattgaaacatggaactctcaacaccctgagctgcaatgcgccggtgtcactgtttccaaacgcaccctcaaccgcaacggcctccacttgccatcttactcaccttat

SEQ ID NO: 5894 - DNA, 704 bp, Artificial
  Mutations within GlyA3B4 introduced by GmGlyA3B4_T03TALE nuclease
gttcatgtacggttgcagatataaacgaagcatagcttatgtatgaggtgtaacaaaattggaaacaatagccatgcaaggtgaagaatgtcaccaactcagaaacccttcttcattgacgtgtccctcactcactctcctctcttcactataaatcgccactcttcgtgttctccacttcaccaactccttcaaacttattaacactttccttagttcaatatggggaagcccttcttcactctctctctttcttccctttgcttgctactcttgtcgagtgcatgctttgctattacctccagcaagcccccgttcagcccgaccgctgcgccttatccggtaactatcgtcgagtgccaactcaacaacctcaacgcgttggaacccgaccaccgcgttgagtccgaaggtggtcttattgaaacatggaactctcaacaccctgagctgcaatgcgccggtgtcactgtttccaaacgcaccctcaaccgcaacggcctccacttgccatcttactcacctttatccccaaatgatcattgtcgtcaaggtgcgtaatattagtaagaagtatttatcagcttaacgtgataacaataatagtaatatgaaatatttattaaaattttttataaattaatctctgctagaaaatttgaattaatcattttagtagaatttgtttttctcaactaggtatt

SEQ ID NO: 5895 - DNA, 426 bp, Artificial; identical to SEQ ID NO: 4777
  Mutations within GlyA3B4 introduced by GmGlyA3B4_T03TALE nuclease

SEQ ID NO: 5896 - DNA, 631 bp, Artificial; identical to SEQ ID NO: 5879
  Mutations within GlyA3B4 introduced by GmGlyA3B4_T03TALE nuclease

SEQ ID NO: 5897 - DNA, 604 bp, Artificial
  Mutations within GlyA3B4 introduced by GmGlyA3B4_T03TALE nuclease
gttcatgtacggttgcagatataaacgaagcatagcttatgtatgaggtgtaacaaaattggaaacaatagccatgcaaggtgaagaatgtcaccaactcagaaacccttcttcattgacgtgtccctcactcactctcctctcttcactataaatcgccactcttcgtgttctccacttcaccaactccttcaaacttattaacactttccttagttcaatatggggaagcccttcttcactctctctctttcttccctttgcttgctactcttgtcgagtgcatgctttgctattacctccagcaaacgtgccaactcaacaacctcaacgcgttggaacccgaccaccgcgttgagtccgaaggtggtcttattgaaacatggaactctcaacaccctgagctgcaatgcgccggtgtcactgtttccaaacgcaccctcaaccgcaacggcctccacttgccatcttactcaccttatccccaaatgatcattgtcgttcaaggtgcgtaatattagtaagaagtatttatcagcttaacgtgataacaataatagtaatatgaaatatttattaaatttttataattaatctctgctag

SEQ ID NO: 5898 - DNA, 658 bp, Artificial
  Mutations within GlyA3B4 introduced by GmGlyA3B4_T03TALE nuclease
  misc_feature (532): n is a or c or t or g
gttcatgtacggttgcagatataaacgaagcatagcttatgtatgaggtgtaacaaaattggaaacaatagccatgcaaggtgaagaatgtcaccaactcagaaacccttcttcattgacgtgtccctcactcactctcctctcttcactataaatcgccactcttcgtgttctccacttcaccaactccttcaaacttattaacactttccttagttcaatatggggaagcccttcttcactctctctctttcttccctttgcttgctactcttgtcgagtgcatgctttgctattacctccagcaagttcgagtgccaactcaacaacctcaacgcgttggaacccgaccaccgcgttgagtccgaaggtggtcttattgaaacatggaactctcaacaccctgagctgcaatgcgccggtgtcactgtttccaaacgcaccctcaaccgcaacggcctccacttgccatcttactcaccttatccccaaatgatcattgtcgttcaaggtgcgtaatattagtaagagnatttatcagcttaacgtgataacaatatagtaatatgaaatatttattaaatttttataattaatctctgctagaaaatttgattaatcatttttagtagaatttgtttttctcaactaggttttt

SEQ ID NO: 5899 - DNA, 659 bp, Artificial
  Mutations within GlyA3B4 introduced by GmGlyA3B4_T03TALE nuclease
gttcatgtacggttgcagatataaacgaagcatagcttatgtatgaggtgtaacaaaattggaaacaatagccatgcaaggtgaagaatgtcaccaactcagaaacccttcttcattgacgtgtccctcactcactctcctctcttcactataaatcgccactcttcgtgttctccacttcaccaactccttcaaacttattaacactttccttagttcaatatggggaagcccttcttcactctctctctttcttccctttgcttgctactcttgtcgagtgcatgctttgctattacctccagcaagtgccaactcaacaacctcaacgcgttggaacccgaccaccgcgttgagtccgaaggtggtcttattgaaacatggaactctcaacacctgagctgcaatgcgccggtgtcactgtttccaaacgcaccctcaaccgcaacggcctccacttgccatcttactcaccttatccccaaatgatcattgtcgttcaaggtgcgtaatattagtaagaagtatttatcagcttaacgtgataacaataatagtaatatgaaatatttattaaatttttataattaatctctgctagaaaatttgattaatcattttagtagaatttgttttctcaactaggttttaaaacacca

SEQ ID NO: 5900 - DNA, 557 bp, Artificial
  Mutations within GlyA3B4 introduced by GmGlyA3B4_T03TALE nuclease
gttcatgtacggttgcagatataaacgaagcatagcttatgtatgaggtgtaacaaaattggaaacaatagccatgcaaggtgaagaatgtcaccaactcagaaacccttcttcattgacgtgtccctcactcactctcctctcttcactataaatcgccactcttcgtgttctccacttcaccaactccttcaaacttattaacactttccttagttcaatatggggaagcccttcttcactctctctctttcttccctttgcttgctactcttgtcgagtgcatgctttggaacccgaccaccgcgttgagtccgaaggtggtcttattgaaacatggaactctcaacaccctgagctgcaatgcgccggtgtcactgtttccaaacgcaccctcaaccgcaacggcctccacttgccatcttactcaccttatccccaaatgatcattgtcgttcaaggtgcgtaatattagtaagaagtatttatcagcttaacgtgataacaataatagtaatatgaaatatttattaatttttataattaatctctgctag

SEQ ID NO: 5901 - DNA, 641 bp, Artificial
  Mutations within GlyA3B4 introduced by GmGlyA3B4_T03TALE nuclease
gttcatgtacggttgcagatataaacgaagcatagcttatgtatgaggtgtaacaaaattggaaacaatagccatgcaaggtgaagaatgtcaccaactcagaaacccttcttcattgacgtgtccctcactcactctcctctcttcactataaatcgccactcttcgtgttctccacttcaccaactccttcaaacttattaacactttccttagttcaatatggggaagcccttcttcactctctctctttcttccctttgcttgctactcttgtcgagtgcatgtgccaactcaacaacctcaacgcgttggaacccgaccaccgcgttgagtccgaaggtggtcttattgaaacatggaactctcaacaccctgagctgcaatgcgccggtgtcactgtttccaaacgcaccctcaaccgcaacggcctccacttgccatcttactcaccttatccccaaatgatcattgtcgttcaaggtgcgtaatattagtaagaagtatttatcagcttaacgtgataacaataatagtaatatgaaatatttattaaattttttataattaatctctgctagaaaatttgattaatcatttttagtagaatttgttttttctcaactaggttttaaacacca

SEQ ID NO: 5902 - DNA, 618 bp, Artificial; identical to SEQ ID NO: 5785
  Mutations within GlyA3B4 introduced by GmGlyA3B4_T03TALE nuclease

SEQ ID NO: 5903 - DNA, 667 bp, Artificial
  Mutations within GlyA3B4 introduced by GmGlyA3B4_T03TALE nuclease
gttcatgtacggttgcagatataaacgaagcatagcttatgtatgaggtgtaacaaaattggaaacaatagccatgcaaggtgaagaatgtcaccaactcagaaacccttcttcattgacgtgtccctcactcactctcctctcttcactataaatcgccactcttcgtgttctccacttcaccaactccttcaaacttattaacactttccttagttcaatatggggaagcccttcttcactctctctctttcttccctttgcttgctactcttgtcgagtgcatgctttgctattacctccagcaagttgcaacctactcaacaacctcaacgcgttggaaacccgaccaccgcgttgagtccgaaggtggtctttattgaaacatggaactctcaacaccctgagctgcaatgcgccggtgtcactgtttccaaacgcaccctcaaccgcaacggcctccacttgccatcttactcaccttatccccaaatgatcattgtcgttcaaggtgcgtaatattagtaagaagtatttatcagcttaacgtgataacaataatagtaatatgaaatatttattaaatttttataattaatctctgctagaaaatttgattaatcattttagtagaatttgttttctcaactaggtttttaaaacacca

SEQ ID NO: 5904 - DNA, 618 bp, Artificial; identical to SEQ ID NO: 5404
  Mutations within GlyA3B4 introduced by GmGlyA3B4_T03TALE nuclease

SEQ ID NO: 5905 - DNA, 647 bp, Artificial
  Mutations within GlyA3B4 introduced by GmGlyA3B4_T03TALE nuclease
gttcatgtacggttgcagatataaacgaagcatagcttatgtatgaggtgtaacaaaattggaaacaatagccatgcaaggtgaagaatgtcaccaactcagaaacccttcttcattgacgtgtccctcactcactctcctctcttcactataaatcgccactcttcgtgttctccacttcaccaactccttcaaacttattaacactttccttagttcaatatggggaagcccttcttcactctctctctttcttccctttgcttgctactcttgtcgagtgcatgctttgctattacctccagcaagttagtgccaactcaacaacctcaacgcgttggaacccgaccaccgcgttgagtccgaaggtggtcttattgaaacatggaactctcaacaccctgagctgcaatgcgccggtgtcactgtttccaaacgcaccctcaaccgcaacggcctccacttgccatcttactcaccttatccccaaatgatcattgtcgttcaaggtgcgtaatattagtaagaagtatttatcagcttaacgtgataacaataatagtaatatgaaatatttattaaatttttataattaatctctgctagaaaatttgattaatcattttagtagaatttgtttttctcaa

SEQ ID NO: 5906 - DNA, 483 bp, Artificial; identical to SEQ ID NO: 5240
  Mutations within GlyA3B4 introduced by GmGlyA3B4_T03TALE nuclease

SEQ ID NO: 5907 - DNA, 652 bp, Artificial
  Mutations within GlyA3B4 introduced by GmGlyA3B4_T03TALE nuclease
gttcatgtacggttgcagatataaacgaagcatagcttatgtatgaggtgtaacaaaattggaaacaatagccatgcaaggtgaagaatgtcaccaactcagaaacccttcttcattgacgtgtccctcactcactctcctctcttcactataaatcgccactcttcgtgttctccacttcaccaactccttcaaacttattaacactttccttagttcaatatggggaagcccttcttcactctctctctttcttccctttgcttgctactcttgtcgagtgcatgctttgctattacctccagcaagttgccaactcaacaacctcaacgcgttggaacccgaccaccgcgttgagtccgaaggtggtcttattgaaacatggaactctcaacaccctgagctgcaatgcgccggtgtcactgtttccaaacgcaccctcaaccgcaacggcctccacttgccatcttactcaccttatccccaaatgatcattgtcgttcaaggtgcgtaatattagtaagaagtatttatcagcttaacgtgataacaatatagtaatatgaaatatttattaaatttttataattaatctctgctagaaaatttgattaatcattttagtagaatttgttttctcaactaggttttt

SEQ ID NO: 5908 - DNA, 651 bp, Artificial; identical to SEQ ID NO: 5267
  Mutations within GlyA3B4 introduced by GmGlyA3B4_T03TALE nuclease

SEQ ID NO: 5909 - DNA, 647 bp, Artificial
  Mutations within GlyA3B4 introduced by GmGlyA3B4_T03TALE nuclease
gttcatgtacggttgcagatataaacgaagcatagcttatgtatgaggtgtaacaaaattggaaacaatagccatgcaaggtgaagaatgtcaccaactcagaaacccttcttcattgacgtgtccctcactcactctcctctcttcactataaatcgccactcttcgtgttctccacttcaccaactccttcaaacttattaacactttccttagttcaatatggggaagcccttcttcactctctctctttcttccctttgcttgctactcttgtcgagtgcatgctttgctattacctccagcaagttccaactcaacaacctcaacgcgttggaacccgaccaccgcgttgagtccgaaggtggtcttattgaaacatggaactctcaacaccctgagctgcaatgcgccggtgtcactgtttccaaacgcaccctcaaccgcaacggcctccacttgccatcttactcaccttatccccaaatgatcattgtcgttcaaggtgcgtaatattagtaagaagtatttatcagcttaacgtgataacaataatagtaatatgaaatatttattaaatttttataattaatctctgctagaaaatttgattaatcattttagtagaatttgttttctcaactagg

SEQ ID NO: 5910 - DNA, 656 bp, Artificial
  Mutations within GlyA3B4 introduced by GmGlyA3B4_T03TALE nuclease
gttcatgtacggttgcagatataaacgaagcatagcttatgtatgaggtgtaacaaaattggaaacaatagccatgcaaggtgaagaatgtcaccaactcagaaacccttcttcattgacgtgtccctcactcactctcctctcttcactataaatcgccactcttcgtgttctccacttcaccaactccttcaaacttattaacactttccttagttcaatatggggaagcccttcttcactctctctctttcttccctttgcttgctactcttgtcgagtgcatgctttgctattacctccagcaagttgagtgccaactcaacaacctcaacgcgttggaacccgaccaccgcgttgagtccgaaggtggtcttattgaaacatggaactctcaacaccctgagctgcaatgcgccggtgtcactgtttccaaacgcaccctcaaccgcaacggcctccacttgccatcttactcaccttatccccaaatgatcattgtcgttcaaggtgcgtaatattagtaagaagtatttatcagcttaacgtgataacaataatagtaatatgaaatatttattaaatttttataattaatctctgctagaaaatttgattaatcattttagtagaatttgttttctcaactaggtttt

SEQ ID NO: 5911 - DNA, 652 bp, Artificial
  Mutations within GlyA3B4 introduced by GmGlyA3B4_T03TALE nuclease
gttcatgtacggttgcagatataaacgaagcatagcttatgtatgaggtgtaacaaaattggaaacaatagccatgcaaggtgaagaatgtcaccaactcagaaacccttcttcattgacgtgtccctcactcactctcctctcttcactataaatcgccactcttcgtgttctccacttcaccaactccttcaaacttattaacactttccttagttcaatatggggaagcccttcttcactctctctctttcttccctttgcttgctactcttgtcgagtgcatgctttgctattacctccagcaagtacgccaactcaacaacctcaacgcgttggaacccgaccaccgcgttgagtccgaaggtggtcttattgaaacatggaactctcaacaccctgagctgcaatgcgccggtgtcactgtttccaaacgcaccctcaaccgcaacggcctccacttgccatcttactcaccttatccccaaatgatcattgtcgttcaaggtgcgtaatattagtaagaagtatttatcagcttaacgtgatacaatatagtaatatgaaatatttattaaatttttataattaatctctgctagaaaatttgattaatcattttagtagaatttgttttctcaactaggttttt

SEQ ID NO: 5912 - DNA, 622 bp, Artificial; identical to SEQ ID NO: 5263
  Mutations within GlyA3B4 introduced by GmGlyA3B4_T03TALE nuclease

SEQ ID NO: 5913 - DNA, 539 bp, Artificial
  Mutations within GlyA3B4 introduced by GmGlyA3B4_T03TALE nuclease
gttcatgtacggttgcagatataaacgaagcatagcttatgtatgaggtgtaacaaaattggaaacaatagccatgcaaggtgaagaatgtcaccaactcagaaacccttcttcattgacgtgtccctcactcactctcctctcttcactataaatcgccactcttcgtgttctccacttcaccaactccttcaaacttattaacactttccttagttcaatatggggaagcccttcttcactctctctctttcttccctttgcttgctactcttgtcgagtgcatgctttgctattacctccagcgcaaaggaacccgaccaccgcgttgagtccgaaggtggtcttattgaaacatggaactctcaacaccctgagctgcaatgcgccggtgtcactgtttccaaacgcaccctcaaccgcaacggcctccacttgccatcttactcaccttatccccaaatgatcattgtcgttcaaggtgcgtaaatattagtaagaagtatttatcagcttaacgtgataacaataatagtaat

SEQ ID NO: 5914 - DNA, 665 bp, Artificial
  Mutations within GlyA3B4 introduced by GmGlyA3B4_T03TALE nuclease
gttcatgtacggttgcagatataaacgaagcatagcttatgtatgaggtgtaacaaaattggaaacaatagccatgcaaggtgaagaatgtcaccaactcagaaacccttcttcattgacgtgtccctcactcactctcctctcttcactataaatcgccactcttcgtgttctccacttcaccaactccttcaaacttattaacactttccttagttcaatatggggaagcccttcttcactctctctctttcttccctttgcttgctactcttgtcgagtgcatgctttgctattacctccagcaagttcgtgccaactcaacaacctcaacgcgttggaacccgaccaccgcgttgagtccgaaggtggtcttattgaaacatggaactctcaacaccctgagctgcaatgcgccggtgtcactgtttccaaacgcaccctcaaccgcaacggcctccacttgccatcttactcaccttatccccaaatgatcattgtcgttcaaggtgcgtaatattagtaagaagtatttatcagcttaacgtgataacaataatagtaatatgaaatatttattaaatttttataattaatctctgctagaaaatttgattaatcattttagtagaatttgtttttctcaactaggttttaaaacacca

SEQ ID NO: 5915 - DNA, 709 bp, Artificial
  Mutations within GlyA3B4 introduced by GmGlyA3B4_T03TALE nuclease
gttcatgtacggttgcagatataaacgaagcatagcttatgtatgaggtgtaacaaaattggaaacaatagccatgcaaggtgaagaatgtcaccaactcagaaacccttcttcattgacgtgtccctcactcactctcctctcttcactataaatcgccactcttcgtgttctccacttcaccaactccttcaaacttattaacactttccttagttcaatatggggaagcccttcttcactctctctctttcttccctttgcttgctactcttgtcgagtgcatgctttgctattaccccccaatcccttttttcactgcatccagcgcaggacgcccgccgaggcaggccaaggcgacgaggtggtcgacgagtgccaactcaacacctcaacgcgttggaccgaccaccgcgttgagtccgaaggtggtcttattgaaacatggaactctcaacaccctgagctgcaatgcgccggtgtcactgtttccaaacgcaccctcaaccgcaacggcctccacttgccatcttactcaccttatccccaaatgatcattgtcgttcaaggtgcgtaatattagtaagaagtatttatcagcttaacgtgataacaataatagtaatatgaaatatttattaaaattttttataattaatctctgctagaaaaatttgattaatcatttttagttagaatttgtttttct

SEQ ID NO: 5916 - DNA, 664 bp, Artificial
  Mutations within GlyA3B4 introduced by GmGlyA3B4_T03TALE nuclease
gttcatgtacggttgcagatataaacgaagcatagcttatgtatgaggtgtaacaaaattggaaacaatagccatgcaaggtgaagaatgtcaccaactcagaaacccttcttcattgacgtgtccctcactcactctcctctcttcactataaatcgccactcttcgtgttctccacttcaccaactccttcaaacttattaacactttccttagttcaatatggggaagcccttcttcactctctctctttcttccctttgcttgctactcttgtcgagtgcatgctttgctattacctccagcaagttcagtgccaactcaacaacctcaacgcgttggaacccgaccaccgcgttgagtccgaaggtggtcttattgaaacatggaactctcaacaccctgagctgcaatgcgccggtgtcactgtttccaaacgcaccctcaaccgcaacggcctccacttgccatcttactcaccttatccccaaatgatcattgtcgttcaaggtgcgtaatattagtaagaagtatttatcagcttaacgtgataacaataatagtaatatgaaatatttattaaatttttataattaatctctgctagaaaatttgattaatcattttagtagaatttgttttctcaactaggttttaaaacacc

SEQ ID NO: 5917 - DNA, 619 bp, Artificial
  Mutations within GlyA3B4 introduced by GmGlyA3B4_T03TALE nuclease
gttcatgtacggttgcagatataaacgaagcatagcttatgtatgaggtgtaacaaaattggaaacaatagccatgcaaggtgaagaatgtcaccaactcagaaaccccttcttcattgacgtgtccctcactcactctcctctcttcactataaatcgccactcttcgtgttctccacttcaccaactccttcaaacttattaacactttccttagttcaatatggggaagcccttcttcactctctctctttcttccctttgcttgctactcttgtcgagtgcatgctttgctattacctccagcaagtgccaactcaacaacctcaacgcgttggaacccgaccaccgcgttgagtccgaaggtggtcttattgaaacatggaactctcaacaccctgagctgcaatgcgccggtgtcactgtttccaaacgcaccctcaaccgcaacggcctccacttgccatcttactcaccttatcccccaaatgatcattgtcgttcaaggtgcgtaatattagtaagaagtatttatcagcttaacgtgataacaatatagtaatatgaaatatttattaaatttttataattaatctctgctagaaaatttgattaatca

SEQ ID NO: 5918 - DNA, 633 bp, Artificial
  Mutations within GlyA3B4 introduced by GmGlyA3B4_T03TALE nuclease
gttcatgtacggttgcagatataaacgaagcatagcttatgtatgaggtgtaacaaaattggaaacaatagccatgcaaggtgaagaatgtcaccaactcagaaacccttcttcattgacgtgtccctcactcactctcctctcttcactataaatcgccactcttcgtgttctccacttcaccaactccttcaaacttattaacactttccttagttcaatatggggaagcccttcttcactctctctctttcttccctttgcttgctactcttgtcgagtgcatgctttgctattacctccagcaaagtgccaactcaacaacctcaacgcgttggaacccgaccaccgcgttgagtccgaaggtggtcttattgaaacatggaactctcaacaccctgagctgcaatgcgccggtgtcactgtttccaaacgcaccctcaaccgcaacggcctccacttgccatcttactcaccttatccccaaatgatcattgtcgttcaaggtgcgtaatattagtaagaagtatttatcagcttaacgtgataacaatatagtaatatgaaatatttattaaatttttataattaatctctgctagaaaatttgattaatcattttagtagaatttg

SEQ ID NO: 5919 - DNA, 668 bp, Artificial
  Mutations within GlyA3B4 introduced by GmGlyA3B4_T03TALE nuclease
gttcatgtacggttgcagatataaacgaagcatagcttatgtatgaggtgtaacaaaattggaaacaatagccatgcaaggtgaagaatgtcaccaactcagaaaccccttcttcattgacgtgtccctcactcactctcctctcttcactataaatcgccactcttcgtgttctccacttcaccaactccttcaaacttattaacactttccttagttcaatatggggaagcccttcttcactctctctctttcttccctttgcttgctactcttgtcgagtgcatgcttttgctattacctccagcaagttcaagtgccactcaacaacctcaacgcgttggaacccgaccaccgcgttgagtccgaaggtggtcttattgaaacatggaactctcacaccctgagctgcaatgcgccggtgtcactgtttccaaacgcaccctcaaccgcaacggcctccacttgccatcttactcaccttatccccaaatgatcattgtcgttcaaggtgcgtaatattagtaagaagtatttatcagcttaacgtgataacaatatagtaatatgaaatatttattaaatttttataattaatctctgctagaaaatttgattaatcatttttagtagaatttgtttttctcaactaggtttttaaaacacca

SEQ ID NO: 5920 - DNA, 635 bp, Artificial
  Mutations within GlyA3B4 introduced by GmGlyA3B4_T03TALE nuclease
gttcatgtacggttgcagatataaacgaagcatagcttatgtatgaggtgtaacaaaattggaaacaatagccatgcaaggtgaagaatgtcaccaactcagaaacccttcttcattgacgtgtccctcactcactctcctctcttcactataaatcgccactcttcgtgttctccacttcaccaactccttcaaacttattaacactttccttagttcaatatggggaagcccttcttcactctctctctttcttccctttgcttgctactcttgtcgagtgcatgctttgctattacctccagcaagtacgccaactcaacaacctcaacgcgttggaacccgaccaccgcgttgagtccgaaggtggtcttattgaaacatggaactctcaacaccctgagctgcaatgcgccggtgtcactgtttccaaacgcaccctcaaccgcaacggcctccacttgccatcttactcaccttatccccaaatgatcattgtcgttcaaggtgcgtaatattagtaagaagtatttatcagcttaacgtgataacaataatagtaatatgaaatatttattaaatttttataattaatctctgctagaaaatttgattaatcattttagtagaatttg

SEQ ID NO: 5921 - DNA, 427 bp, Artificial; identical to SEQ ID NO: 4769
  Mutations within GlyA3B4 introduced by GmGlyA3B4_T03TALE nuclease

SEQ ID NO: 5922 - DNA, 652 bp, Artificial
  Mutations within GlyA3B4 introduced by GmGlyA3B4_T03TALE nuclease
gttcatgtacggttgcagatataaacgaagcatagcttatgtatgaggtgtaacaaaattggaaacaatagccatgcaaggtgaagaatgtcaccaactcagaaacccttcttcattgacgtgtccctcactcactctcctctcttcactataaatcgccactcttcgtgttctccacttcaccaactccttcaaacttattaacactttccttagttcaatatggggaagcccttcttcactctctctctttcttccctttgcttgctactcttgtcgagtgcatgctttgctattacctccagcaagttagtgccaactcaacaacctcaacgcgttggaacccgaccacagcgttgagtccgaaggtggtcttattgaaacatggaactctcaacaccctgagctgcaatgcgccggtgtcactgtttccaaacgcaccctcaaccgcaacggcctccacttgccatcttactcaccttatccccaaatgatcattgtcgttcaaggtgcgtaatattagtaagaagtatttatcagcttaacgtgataacaataatagtaatatgaaatatttattaaatttttataattaatctctgctagaaaatttgattaatcattttagtagaatttgtttttctcaactagg

SEQ ID NO: 5923 - DNA, 583 bp, Artificial; identical to SEQ ID NO: 5068
  Mutations within GlyA3B4 introduced by GmGlyA3B4_T03TALE nuclease

SEQ ID NO: 5924 - DNA, 663 bp, Artificial; identical to SEQ ID NO: 5544
  Mutations within GlyA3B4 introduced by GmGlyA3B4_T03TALE nuclease

SEQ ID NO: 5925 - DNA, 593 bp, Artificial
  Mutations within GlyA3B4 introduced by GmGlyA3B4_T03TALE nuclease
gttcatgtacggttgcagatataaacgaagcatagcttatgtatgaggtgtaacaaaattggaaacaatagccatgcaaggtgaagaatgtcaccaactcagaaacccttcttcattgacgtgtccctcactcactctcctctcttcactataaatcgccactcttcgtgttctccacttcaccaactccttcaaacttattaacactttccttagttcaatatggggaagcccttcttcactctctctctttcttccctttgcttgctactcttgtcgagtgcatgctttgctattacctccaactcaacaacctcaacgcgttggaacccgaccaccgcgttgagtccgaaggtggtcttattgaaacatggaactctcaacaccctgagctgcaatgcgccggtgtcactgtttccaaacgcaccctcaaccgcaacggcctccacttgccatcttactcaccttatccccaaatgatcattgtcgttcaaggtgcgtaatattagtaagaagtatttatcagcttaacgtgataacaataatagtaatatgaaatatttattaaattttttataattaatctctgctag

SEQ ID NO: 5926 - DNA, 627 bp, Artificial
  Mutations within GlyA3B4 introduced by GmGlyA3B4_T03TALE nuclease
gttcatgtacggttgcagatataaacgaagcatagcttatgtatgaggtgtaacaaaattggaaacaatagccatgcaaggtgaagaatgtcaccaactcagaaacccttcttcattgacgtgtccctcactcactctcctctcttcactataaatcgccactcttcgtgttctccacttcaccaactccttcaaacttattaacactttccttagttcaatatggggaagcccttcttcactctctctctttcttccctttgcttgctactcttgtcgagtgccaactcaacaacctcaacgcgttggaacccgaccaccgcgttgagtccgaaggtggtcttattgaaacatggaactctcgacaccctgagctgcaatgcgccggtgtcactgtttccaaacgcaccctcaaccgcaacggcctccacttgccatcttactcaccttatccccaaatgatcattgtcgttcaaggtgcgtaatattagtaagaagtatttatcagcttaacgtgataacaataatagtaatatgaaatatttattaaattttttataattaatctctgctagaaaatttgattaatcatttttagtagaatttgtttttctcaactaggttttt

SEQ ID NO: 5927 - DNA, 512 bp, Artificial
  Mutations within GlyA3B4 introduced by GmGlyA3B4_T03TALE nuclease
gttcatgtacggttgcagatataaacgaagcatagcttatgtatgaggtgtaacaaaattggaaacaatagccatgcaaggtgaagaatgtcaccaactcagaaacccttcttcattgacgtgtccctcactcactctcctctcttcactataaatcgccactcttcgtgttctccacttcaccaactccttcaaacttattaacactttccttagttcaatatggggaagcccttcttcactctctctctttcttccctttgcttgctactcttgtcgagtgcatgctttgctattacctccagcaagagtgccaactcaacaacctcaacgcgttggaacccgaccaccgcgttgagtccgaaggtggtcttattgaaacatggaactctcaacaccctgagctgcaatgcgccggtgtcactgtttccaaacgcaccctcaccgcaacggcctccacttgccatcttactcaccttatccccaaatgatcattgtcgttcaaggtgcgt

SEQ ID NO: 5928 - DNA, 660 bp, Artificial; identical to SEQ ID NO: 4874
  Mutations within GlyA3B4 introduced by GmGlyA3B4_T03TALE nuclease

SEQ ID NO: 5929 - DNA, 659 bp, Artificial; identical to SEQ ID NO: 5109
  Mutations within GlyA3B4 introduced by GmGlyA3B4_T03TALE nuclease

SEQ ID NO: 5930 - DNA, 645 bp, Artificial
  Mutations within GlyA3B4 introduced by GmGlyA3B4_T03TALE nuclease
gttcatgtacggttgcagatataaacgaagcatagcttatgtatgaggtgtaacaaaattggaaacaatagccatgcaaggtgaagaatgtcaccaactcagaaacccttcttcattgacgtgtccctcactcactctcctctcttcactataaatcgccactcttcgtgttctccacttcaccaactccttcaaacttattaacactttccttagttcaatatggggaagcccttcttcactctctctctttcttccctttgcttgctactcttgtcgagtgcatgctttgctattacctccagcaagtttgccaactcaacaacctcaacgcgttggaacccgaccaccgcgttgagtccgaaggtggtcttattgaaacatggaactctcaacaccctgagctgcaatgcgccggtgtcactgtttccaaacgcaccctcaaccgcaacggcctccacttgccatcttactcaccttatccccaaatgatcattgtcgttcaaggtgcgtaatattagtaagaagtatttatcagcttaacgtgataacaatatagtaatatgaaatatttattaaatttttataatttaatctctgctagaaaatttgattaatcattttagtagaatttgttttctcaac

SEQ ID NO: 5931 - DNA, 645 bp, Artificial
  Mutations within GlyA3B4 introduced by GmGlyA3B4_T03TALE nuclease
gttcatgtacggttgcagatataaacgaagcatagcttatgtatgaggtgtaacaaaattggaaacaatagccatgcaaggtgaagaatgtcaccaactcagaaacccttcttcattgacgtgtccctcactcactctcctctcttcactataaatcgccactcttcgtgttctccacttcaccaactccttcaaacttattaacactttccttagttcaatatggggaagcccttcttcactctctctctttcttccctttgcttgctactcttgtcgagtgcatgctttgctattacctccagcaagttctgccaactcaacaacctcaacgcgttggaacccgaccaccgcgttgagtccgaaggtggtcttattgaaacatggaactctcaacaccctgagctgcaatgcgccggtgtcactgtttccaaacgcaccctcaaccgcaacggcctccacttgccatcttactcaccttatccccaaatgatcattgtcgttcaaggtgcgtaatattagtaagaagtatttatcagcttaacgtgataacaataatagtaatatgaaatatttattaaatttttataattaatctctgctagaaaatttgattaatcattttagtagaatttgttttctcaa

SEQ ID NO: 5932 - DNA, 653 bp, Artificial
  Mutations within GlyA3B4 introduced by GmGlyA3B4_T03TALE nuclease
gttcatgtacggttgcagatataaacgaagcatagcttatgtatgaggtgtaacaaaattggaaacaatagccatgcaaggtgaagaatgtcaccaactcagaaacccttcttcattgacgtgtccctcactcactctcctctcttcactataaatcgccactcttcgtgttctccacttcaccaactccttcaaacttattaacactttccttagttcaatatggggaagcccttcttcactctctctctttcttccctttgcttgctactcttgtcgagtgcatgctttgctattacctccagcaagtgccaactcaacaacctcaacgcgttggaacccgaccaccgcgttgagtccgaaggtggtcttattgaaacatggaactctcaacaccctgagctgcaatgcgccggtgtcactgtttccaaaacgcaccctcaaccgcaacggcctccaacttgccatcttactcaccttatcccaatgatcattgtcgttcaaggtgcgtaatattagtaagaagtatttatcagcttaacgtgataacaataatagtaatatgaaaatatttattaaatttttataattaatctctgctagaaaatttgattaatcattttagtagaatttgtttttctcaactaggtttt

SEQ ID NO: 5933 - DNA, 770 bp, Artificial
  Mutations within GlyA3B4 introduced by GmGlyA3B4_T03TALE nuclease
gttcatgtacggttgcagatataaacgaagcatagcttatgtatgaggtgtaacaaaattggaaacaatagccatgcaaggtgaagaatgtcaccaactcagaaacccttcttcattgacgtgtccctcactcactctcctctcttcactataaatcgccactcttcgtgttctccacttcaccaactccttcaaacttattaacactttccttagttcaatatggggaagcccttcttcactctctctctttcttccctttgcttgctactcttgtcgagtgcatgctttgctattacctccagcaagttcaaccatcgccagcaatggcggtggcaagcaggcgctggagacggtccagcggctgttgccggtgctgtgccaggcccacggcttgaccccccagcaggtggtggccaagtgccaactcaacaacctcaacgcgttggaacccgaccaccgcgttgagtccgaaggtggtcttattgaaacatggaactctcaacaccctgagctgcaatgcgccggtgtcactgtttccaaacgcacctcaaccgcaacggcctccacttgccatcttactcaccttatcccaaatgatcattgtcgttcaaggtgcgtaatattagtaagaagtatttatcgcttaacgtgataacaataatagtaatatgaaaatatttattaaatttttataattaatctctgctagaaaatttgattaatcatttttagtagaatttgtttttctcaactaggtttaaacacca

SEQ ID NO: 5934 - DNA, 637 bp, Artificial
  Mutations within GlyA3B4 introduced by GmGlyA3B4_T03TALE nuclease
gttcatgtacggttgcagatataaacgaagcatagcttatgtatgaggtgtaacaaaattggaaacaatagccatgcaaggtgaagaatgtcaccaactcagaaacccttcttcattgacgtgtccctcactcactctcctctcttcactataaatcgccactcttcgtgttctccacttcaccaactccttcaaacttattaacactttccttagttcaatatggggaagcccttcttcactctctctctttcttccctttgcttgctactcttgtcgagtgcatgctttgctattacctccagcaagtagtgccaactcaacaacctcaacgcgttggaacccgaccaccgcgttgagtccgaaggtggtcttattgaaacatggaactctcaacaccctgagctgcaatgcgccggtgtcactgtttccaaacgcaccctcaaccgcaacggcctccacttgccatcttactcaccttatccccaaatgatcattgtcgttcaaggtgcgtaatattagtaagaagtatttatcagcttaacgtgataacaatatagtaatatgaaatatttattaaatttttataaattaatctctgctagaaaatttgattaatcatttttagtagaatttg

SEQ ID NO: 5935 - DNA, 637 bp, Artificial
  Mutations within GlyA3B4 introduced by GmGlyA3B4_T03TALE nuclease
gttcatgtacggttgcagatataaacgaagcatagcttatgtatgaggtgtaacaaaattggaaacaatagccatgcaaggtgaagaatgtcaccaactcagaaacccttcttcattgacgtgtccctcactcactctcctctcttcactataaatcgccactcttcgtgttctccacttcaccaactccttcaaacttattaacactttccttagttcaatatggggaagcccttcttcactctctctctttcttccctttgcttgctactcttgtcgagtgcatgctttgctattacctccagcaagttcaagtgccactcaacaacctcaacgcgttggaacccgaccaccgcgttgagtccgaaggtggtcttattgaaacatggaactctcaacaccctgagctgcaatgcgccggtgtcactgtttccaaacgcaccctcaaccgcaacggcctccacttgccatcttactcaccttatccccaaatgatcattgtcgttcaaggtgcgtaatattagtaagaagtatttatcagcttaacgtgataacaatatagtaatatgaaatatttattaaatttttataattaatctctgctagaaaatttgattaatcattttagtagaatttg

SEQ ID NO: 5936 - DNA, 625 bp, Artificial
  Mutations within GlyA3B4 introduced by GmGlyA3B4_T03TALE nuclease
gttcatgtacggttgcagatataaacgaagcatagcttatgtatgaggtgtaacaaaattggaaacaatagccatgcaaggtgaagaatgtcaccaactcagaaacccttcttcattgacgtgtccctcactcactctcctctcttcactataaatcgccactcttcgtgttctccacttcaccaactccttcaaacttattaacactttccttagttcaatatggggaagcccttcttcactctctctctttcttccctttgcttgctactcttgtcgagtgcatgccaactcaacaacctcaacgcgttggaacccgaccaccgcgttgagtccgaaggtggtcttattgaaacatggaactctcaacaccctgagctgcaatgcgccggtgtcactgtttccaaacgcaccctcaaccgcaacggcctccacttgccatcttactcaccttatccccaaatgatcattgtcgttcaaggtgcgtaatattagtaagaagtatttatcagcttaacgtgataacaataatagtaatatgaaatatttattaaattttttataattaattctctgctagaaaatttgattaatcatttttagtagaattttgttttttctcaac

SEQ ID NO: 5937 - DNA, 648 bp, Artificial
  Mutations within GlyA3B4 introduced by GmGlyA3B4_T03TALE nuclease
gttcatgtacggttgcagatataaacgaagcatagcttatgtatgaggtgtaacaaaattggaaacaatagccatgcaaggtgaagaatgtcaccaactcagaaacccttcttcattgacgtgtccctcactcactctcctctcttcactataaatcgccactcttcgtgttctccacttcaccaactccttcaaacttattaacactttccttagttcaatatggggaagcccttcttcactctctctctttcttccctttgcttgctactcttgtcgagtgcatgctttgctattacctccagcaagtagtgccaactcaacaacctcaacgcgttggaacccgaccaccgcgttgagtccgaaggtggtcttattgaaacatggaactctcaacaccctgagctgcaatgcgccggtgtcactgtttccaaacgcaccctcaaccgcaacggcctccacttgccatcttactcaccttatccccaaatgatcattgtcgttcaaggtgcgtaatattagtaagaagtatttatcagcttaacgtgatacaatatagtaatatgaaatatttattaaatttttataattaatctctgctagaaaatttgattaatcattttagtagaatttgttttctcaactagg

SEQ ID NO: 5938 - DNA, 657 bp, Artificial
  Mutations within GlyA3B4 introduced by GmGlyA3B4_T03TALE nuclease
gttcatgtacggttgcagatataaacgaagcatagcttatgtatgaggtgtaacaaaattggaaacaatagccatgcaaggtgaagaatgtcaccaactcagaaacccttcttcattgacgtgtccctcactcactctcctctcttcactataaatcgccactcttcgtgttctccacttcaccaactccttcaaacttattaacactttccttagttcaatatggggaagcccttcttcactctctctctttcttccctttgcttgctactcttgtcgagtgcatgctttgctattacctccagcaagttagtgccaactcaacaacctcaacgcgttggaacccgaccaccgcgttgagtccgaaggtggtcttattgaaacatggaactctcaacaccctgagctgcaatgcgccggtgtcactgtttccaaacgcaccctcaaccgcaacggcctccacttgccatcttactcaccttatccccaaatgatcattgtcgttcaaggtgcgtaatattagtaagaagtatttatcagcttaacgtgataacaataatagtaatatgaaatatttattaaatttttataattaatctctgctagaaaatttgattaatcattttagtagaatttgtttttctcaatctaggtttt

SEQ ID NO: 5939 - DNA, 542 bp, Artificial
  Mutations within GlyA3B4 introduced by GmGlyA3B4_T03TALE nuclease
gttcatgtacggttgcagatataaacgaagcatagcttatgtatgaggtgtaacaaaattggaaacaatagccatgcaaggtgaagaatgtcaccaactcagaaacccttcttcattgacgtgtccctcactcactctcctctcttcactataaatcgccactcttcgtgttctccacttcaccaactccttcaaacttattaacactttccttagttcaatatgagtaagttggaacccgaccaccgcgttgagtccgaaggtggtcttattgaaacatggaactctcaacaccctgagctgcaatgcgccggtgtcactgtttccaaacgcaccctcaaccgcaacggcctccacttgccatcttactcaccttatccccaaatgatcattgtcgttcaaggtgcgtaatattagtaagaagtatttatcagcttaacgtgataacaataatagtaatatgaaatatttattaaatttttataattaatctctgctagaaaatttgattaatcatttttagtagaatttgtttttctcaa

SEQ ID NO: 5940 - DNA, 664 bp, Artificial
  Mutations within GlyA3B4 introduced by GmGlyA3B4_T03TALE nuclease
gttcatgtacggttgcagatataaacgaagcatagcttatgtatgaggtgtaacaaaattggaaacaatagccatgcaaggtgaagaatgtcaccaactcagaaacccttcttcattgacgtgtccctcactcactctcctctcttcactataaatcgccactcttcgtgttctccacttcaccaactccttcaaacttattaacactttccttagttcaatatggggaagcccttcttcactctctctctttcttccctttgcttgctactcttgtcgagtgcatgctttgctattacctccagcaagttcagtgccaactcaacaacctcaacgcgttggaacccgaccaccgcgttgagtccgaaggtggtcttattgaaacatggaactctcaacaccctgagctgcaatgcgccggtgtcactgtttccaaacgcaccctcaaccgcaacggcctccacttgccatcttactcaccttatccccaaatgatcattgtcgttcaaggtgcgtaatattagtaagaagtatttatcagcttaacgtgataacaatatagtaatatgaaatatttattaaatttttataattaatctctgctagaaaatttgattaatcattttagtagaatttgttttctcaactaggttttaaaacacca

SEQ ID NO: 5941 - DNA, 639 bp, Artificial; identical to SEQ ID NO: 5598
  Mutations within GlyA3B4 introduced by GmGlyA3B4_T03TALE nuclease

SEQ ID NO: 5942 - DNA, 622 bp, Artificial
  Mutations within GlyA3B4 introduced by GmGlyA3B4_T03TALE nuclease
gttcatgtacggttgcagatataaacgaagcatagcttatgtatgaggtgtaacaaaattggaaacaatagccatgcaaggtgaagaatgtcaccaactcagaaacccttcttcattgacgtgtccctcactcactctcctctcttcactataaatcgccactcttcgtgttctccacttcaccaactccttcaaacttattaacactttccttagttcaatatggggaagcccttcttcactctctctctttcttccctttgcttgctactcttgtcgagtgcatgctttgctattacctccagcaagcaaagggaagaaagagtggaacccgaccaccgcgttgagtccgaaggtggtcttattgaaacatggaactctcaataccctgagctgcaatgcgccggtgtcactgtttccaaacgcaccctcaaccgcaacggcctccacttgccatcttactcaccttatccccaaatgatcattgtcgttcaaggtgcgtaatattagtaagaagtatttatcagcttaacgtgataacaataatagtaatatgaaatatttattaaattttttataattaatctctgctagaaaatttgattaatcatttttagtagaa

SEQ ID NO: 5943 - DNA, 636 bp, Artificial
  Mutations within GlyA3B4 introduced by GmGlyA3B4_T03TALE nuclease
gttcatgtacggttgcagatataaacgaagcatagcttatgtatgaggtgtaacaaaattggaaacaatagccatgcaaggtgaagaatgtcaccaactcagaaacccttcttcattgacgtgtccctcactcactctcctctcttcactataaatcgccactcttcgtgttctccacttcaccaactccttcaaacttattaacactttccttagttcaatatggggaagcccttcttcactctctctctttcttccctttgcttgctactcttgtcgagtgcatgctttgctattacctccagcaagttgagtgccaactcaacaacctcaacgcgttggaacccgaccaccgcgttgagtccgaaggtggtcttattgaacatggaactctcaacaccctgagctgcaatgcgccggtgtcactgtttccaaacgcaccctcaaccgcaacggcctccacttgccatcttactcaccttatccccaaatgatcattgtcgttcaaggtgcgtaatattagtaagaagtatttatcagcttaacgtgataacaatatagtaatatgaaatatttattaaatttttataattaatctctgctagaaaatttgattaatcattttagtagaatttg

SEQ ID NO: 5944 - DNA, 662 bp, Artificial
  Mutations within GlyA3B4 introduced by GmGlyA3B4_T03TALE nuclease
gttcatgtacggttgcagatataaacgaagcatagcttatgtatgaggtgtaacaaaattggaaacaatagccatgcaaggtgaagaatgtcaccaactcagaaacccttcttcattgacgtgtccctcactcactctcctctcttcactataaatcgccactcttcgtgttctccacttcaccaactccttcaaacttattaacactttccttagttcaatatggggaagcccttcttcactctctctctttcttccctttgcttgctactcttgtcgagtgcatgctttgctattacctccagcaagtagtgccaactcaacaacctcaacgcgttggaacccgaccaccgcgttgagtccgaaggtggtcttattgaaacatggaactctcaacaccctgagctgcaatgcgccggtgtcactgtttccaaacgcaccctcaaccgcaacggcctccacttgccatcttactcaccttatccccaaatgatcattgtcgttcaaggtgcgtaatattagtaagaagtatttatcagcttaacgtgataacaataatagtaatatgaaatatttattaaatttttataattaatctctgctagaaaatttgattaatcattttagtagaatttgttttctcaactaggttttaaacacca

SEQ ID NO: 5945 - DNA, 664 bp, Artificial
  Mutations within GlyA3B4 introduced by GmGlyA3B4_T03TALE nuclease
gttcatgtacggttgcagatataaacgaagcatagcttatgtatgaggtgtaacaaaattggaaacaatagccatgcaaggtgaagaatgtcaccaactcagaaacccttcttcattgacgtgtccctcactcactctcctctcttcactataaatcgccactcttcgtgttctccacttcaccaactccttcaaacttattaacactttccttagttcaatatggggaagcccttcttcactctctctctttcttccctttgcttgctactcttgtcgagtgcatgctttgctattacctccagcaagagtgccaactcaacaacctcaacgcgttggaacccgaccaccgcgttgagtccgaaggtggtcttattgaaacatggaactctcaacaccctgagctgcaatgcgccggtgtcactgtttccaaacgcaccctcaaccgcaacggcctccacttgccatcttactcaccttatcccccaaatgatcattgtcgttcaaggtgcgtaatattagtaagaagtatttatcagcttaacgtgataacaataatagtaatatgaaatatttattaaatttttataattaatctctgctagaaaatttgattaatcattttagtagaatttgttttctcaactaggtttttaaaacacca

SEQ ID NO: 5946 - DNA, 548 bp, Artificial
  Mutations within GlyA3B4 introduced by GmGlyA3B4_T03TALE nuclease
gttcatgtacggttgcagatataaacgaagcatagcttatgtatgaggtgtaacaaaattggaaacaatagccatgcaaggtgaagaatgtcaccaactcagaaacccttcttcattgacgtgtccctcactcactctcctctcttcactataaatcgccactcttcgtgttctccacttcaccaactccttcaaacttattaacactttccttagttcaatatggggaagcccttcttcactctctctctttcttccctttgcttgctactcttgtcgagtgcatgctttgctattacctccagcaagttcaacgttggaacccgaccaccgcgttgagtccgaaggtggtcttattgaaacatggaactctcaacaccctgagctgcaatgcgccggtgtcactgtttccaaacgcaccctcaaccgcaacggcctccacttgccatcttactcaccttatccccaaatgatcattgtcgttcaaggtgcgtaatattagtaagaagtatttatcagcttaacgtgataacaataatagtaatatg

SEQ ID NO: 5947 - DNA, 659 bp, Artificial
  Mutations within GlyA3B4 introduced by GmGlyA3B4_T03TALE nuclease
gttcatgtacggttgcagatataaacgaagcatagcttatgtatgaggtgtaacaaaattggaaacaatagccatgcaaggtgaagaatgtcaccaactcagaaacccttcttcattgacgtgtccctcactcactctcctctcttcactataaatcgccactcttcgtgttctccacttcaccaactccttcaaacttattaacactttccttagttcaatatggggaagcccttcttcactctctctctttcttccctttgcttgctactcttgtcgagtgcatgctttgctattacctccagcaagttcaactcaacaacctcaacgcgttggaacccgaccaccgcgttgagtccgaaggtggtcttattgaaacatggaactctcaacaccctgagctgcaatgcgccggtgtcactgtttccaaacgcaccctcaaccgcaacggcctccacttgccatcttactcaccttatccccaaatgatcattgtcgttcaaggtgcgtaatattagtaagaagtatttatcagcttaacgtgataacaataatagtaatatgaaatatttattaaatttttataattaatctctgctagaaaatttgattaatcattttagtagaatttgttttctcaactaggttttaaaacacca

SEQ ID NO: 5948 - DNA, 633 bp, Artificial
  Mutations within GlyA3B4 introduced by GmGlyA3B4_T03TALE nuclease
gttcatgtacggttgcagatataaacgaagcatagcttatgtatgaggtgtaacaaaattggaaacaatagccatgcaaggtgaagaatgtcaccaactcagaaacccttcttcattgacgtgtccctcactcactctcctctcttcactataaatcgccactcttcgtgttctccacttcaccaactccttcaaacttattaacactttccttagttcaatatggggaagcccttcttcactctctctctttcttccctttgcttgctactcttgtcgagtgcatgctttgctattacctccagcaagtacgccaactcaacaacctcaacgcgttggaacccgaccaccgcgttgagtccgaaggtggtcttattgaaacatggaactctcaacaccctgagctgcaatgcgccggtgtcactgtttccaaacgcaccctcaaccgcaacggcctccacttgccatcttactcaccttatccccaaatgatcattgtcgttcaaggtgcgtaatattagtaagagtatttatcagcttaacgtgataacaatatagtaatatgaaatatttattaaatttttataattaatctctgctagaaaatttgattaatcattttagtagaatttg

SEQ ID NO: 5949 - DNA, 635 bp, Artificial
  Mutations within GlyA3B4 introduced by GmGlyA3B4_T03TALE nuclease
gttcatgtacggttgcagatataaacgaagcatagcttatgtatgaggtgtaacaaaattggaaacaatagccatgcaaggtgaagaatgtcaccaactcagaaacccttcttcattgacgtgtccctcactcactctcctctcttcactataaatcgccactcttcgtgttctccacttcaccaactccttcaaacttattaacactttccttagttcaatatggggaagcccttcttcactctctctctttcttccctttgcttgctactcttgtcgagtgcatgctttgctattacctccagcaaagagtgccaactcaacaacctcaacgcgttggaacccgaccaccgcgttgagtccgaaggtggtcttattgaacatggaactctcaacaccctgagctgcaatgcgccggtgtcactgtttccaaacgcaccctcaaccgcaacggcctccacttgccatcttactcaccttatccccaaatgatcattgtcgttcaaggtgcgtaatattagtaagaagtatttatcagcttaacgtgataacaatatagtaatatgaaatatttattaaatttttataattaatctctgctagaaaatttgattaatcatttttagtagaatttg

SEQ ID NO: 5950 - DNA, 561 bp, Artificial
  Mutations within GlyA3B4 introduced by GmGlyA3B4_T03TALE nuclease
gttcatgtacggttgcagatataaacgaagcatagcttatgtatgaggtgtaacaaaattggaaacaatagccatgcaaggtgaagaatgtcaccaactcagaaacccttcttcattgacgtgtccctcactcactctcctctcttcactataaatcgccactcttcgtgttctccacttcaccaactccttcaaacttattaacactttccttagttcaatatggggaagcccttcttcactctctctctttcttcccgaccaccgcgttgagtccgaaggtggtcttattgaaacatggaactctcaacaccctgagctgcaatgcgccggtgtcactgtttccaaacgcaccctcaaccgcaacggcctccacttgccatcttactcaccttatccccaaaatgatcattgtcgttcaaggtgcgtaatattagtaagaagtatttatcagcttaacgtgataacaataatagtaatatgaaatatttattaaattttttataattaatctctgctagaaaatttgattaatcatttttagtagaatttgtttttctc

SEQ ID NO: 5951 - DNA, 646 bp, Artificial; identical to SEQ ID NO: 5043
  Mutations within GlyA3B4 introduced by GmGlyA3B4_T03TALE nuclease

SEQ ID NO: 5952 - DNA, 633 bp, Artificial
  Mutations within GlyA3B4 introduced by GmGlyA3B4_T03TALE nuclease
gttcatgtacggttgcagatataaacgaagcatagcttatgtatgaggtgtaacaaaaattgggaaacaatagccatgcaaggtgaagaatgtcaccaactcagaaacccttcttcattgacgtgtccctcactcactctcctctcttcactataaatcgccactcttcgtgttctccacttcaccaactccttcaaacttattaacactttccttagttcaatatggggaagcccttcttcactctctctctttcttccctttgcttgctactcttgtcgagtgcatgctttgctattacctccagcaaccaactcaacaacctcaacgcgttggaacccgaccaccgcgttgagtccgaaggtggtcttattgaaacatggaactctcaacaccctgagctgcaatgcgccggtgtcactgtttccaaacgcaccctcaaccgcaacggcctccacttgccatcttactcaccttatccccaaatgatcattgtcgttcaaggtgcgtaatattagtaagaagtatttatcagcttaacgtgataacaataatagtaatatgaaatatttattaaatttttataattaatctctgctagaaaatttgattaatcatttttagtagaatttg

SEQ ID NO: 5953 - DNA, 656 bp, Artificial; identical to SEQ ID NO: 5183
  Mutations within GlyA3B4 introduced by GmGlyA3B4_T03TALE nuclease

SEQ ID NO: 5954 - DNA, 454 bp, Artificial
  Mutations within GlyA3B4 introduced by GmGlyA3B4_T03TALE nuclease
gttcatgtacggttgcagatataaacgaagcatagcttatgtatgaggtgtaacaaaattggaaacaatagccatgcaaggtgaagaatgtcaccaactcagaaacccctttcttcattgacgtcgtccctcactcactctcctctcttcactataaatcgccactcttcgtgttctccacttcaccaactccttcaaacttattaacactttccttagttcaatatggggaagcccttcttcactctctctctttcttccctttgcttgctactcttgtcgagtgcatgctttgctattaacgcgttggaaccgaccaccgcgttgagtccgaaacggtggtcttattgaacatggactctcaacaccctgagctgcaatgcgccggtgtcactgtttccaaacgcatccctcaaaccgcaacggcctccacttgccatcttactcaccttat

SEQ ID NO: 5955 - DNA, 655 bp, Artificial
  Mutations within GlyA3B4 introduced by GmGlyA3B4_T03TALE nuclease
gttcatgtacggttgcagatataaacgaagcatagcttatgtatgaggtgtaacaaaattggaaacaatagccatgcaaggtgaagaatgtcaccaactcagaaacccttcttcattgacgtgtccctcactcactctcctctcttcactataaatcgccactcttcgtgttctccacttcaccaactccttcaaacttattaacactttccttagttcaatatggggaagcccttcttcactctctctctttcttccctttgcttgctactcttgtcgagtgcatgctttgctattacctccagcaagttgagtgccaactcaacaacctcaacgcgttggaacccgaccaccgcgttgagtccgaaggtggtcttattgaaacatggaactctcaacaccctgagctgcaatgcgccggtgtcactgtttccaaacgcaccctcaaccgcaacggcctccacttgccatcttactcaccttatcccccaaatgatcattgtcgttcaaggtgcgtaatattagtaagaagtatttatcagcttaacgtgatacaatatagtaatatgaaatatttattaaatttttataattaatctctgctagaaaatttgattaatcattttagtagaatttgttttctcaactaggtttt

SEQ ID NO: 5956 - DNA, 620 bp, Artificial
  Mutations within GlyA3B4 introduced by GmGlyA3B4_T03TALE nuclease
gttcatgtacggttgcagatataaacgaagcatagcttatgtatgaggtgtaacaaaattggaaacaatagccatgcaaggtgaagaatgtcaccaactcagaaacccttcttcattgacgtgtccctcactcactctcctctcttcactataaatcgccactcttcgtgttctccacttcaccaactccttcaaacttattaacactttccttagttcaatatggggaagcccttcttcactctctctctttcttccctttgcttgctactcttgtcgagtgcatgctttgctattacctccagcaagtagtgccaactcaacaacctcaacgcgttggaacccgaccaccgcgttgagtccgaaggtggtcttattgaaacatggaactctcaacaccctgagctgcaatgcgccggtgtcactgtttccaaacgcaccctcaaccgcaacggcctccacttgccatcttactcaccttatccccaaatgatcattgtcgttcaaggtgcgtaatattagtaagaagtatttatcagcttaacgtgataacaatatagtaatatgaaatatttattaaatttttataattaatctctgctagaaaatttgattaatca

SEQ ID NO: 5957 - DNA, 650 bp, Artificial
  Mutations within GlyA3B4 introduced by GmGlyA3B4_T03TALE nuclease
gttcatgtacggttgcagatataaacgaagcatagcttatgtatgaggtgtaacaaaattggaaacaatagccatgcaaggtgaagaatgtcaccaactcagaaacccttcttcattgacgtgtccctcactcactctcctctcttcactataaatcgccactcttcgtgttctccacttcaccaactccttcaaacttattaacactttccttagttcaatatggggaagcccttcttcactctctctctttcttccctttgcttgctactcttgtcgagtgcatgctttgctattacctccagcaagttcgagtgccaactcaacaacctcaacgcgttggaacccgaccaccgcgttgagtccgaaggtggtcttattgaaacatggaactctcaacaccctgagctgcaatgcgccggtgtcactgtttccaaacgcaccctcaaccgcaacggcctccacttgccatcttactcaccttatccccaaatgatcattgtcgttcaaggtgcgtaatattagtaagagtatttatcagcttaacgtgatacaatatagtaatatgaaatatttattaaatttttataattaatctctgctagaaaatttgattaatcattttagtagaatttgttttctcaactagg

SEQ ID NO: 5958 - DNA, 595 bp, Artificial
  Mutations within GlyA3B4 introduced by GmGlyA3B4_T03TALE nuclease
gttcatgtacggttgcagatataaacgaagcatagcttatgtatgaggtgtaacaaaattggaaacaatagccatgcaaggtgaagaatgtcaccaactcagaaacccttcttcattgacgtgtccctcactcactctcctctcttcactataaatcgccactcttcgtgttctccacttcaccaactccttcaaacttattaacactttccttagttcaatatggggaagcccttcttcactctctctctttcttccctttgcttgctaataagatgattagccccattgcgtaaatattgcacttggaacccgaccaccgcgttgagtccgaaggtggtcttattgaaacatggaactctcaacaccctgagctgcaatgcgccggtgtcactgtttccaaacgcaccctcaaccgcaacggcctccacttgccatcttactcaccttatccccaaatgatcattgtcgttcaaggtgcgtaatattagtaagaagtatttatcagcttaacgtgataacaataatagtaatatgaatatttattaattttttataattaatctctgctagaaatttgattaatcatttttag

SEQ ID NO: 5959 - DNA, 646 bp, Artificial; identical to SEQ ID NO: 4907
  Mutations within GlyA3B4 introduced by GmGlyA3B4_T03TALE nuclease

SEQ ID NO: 5960 - DNA, 570 bp, Artificial
  Mutations within GlyA3B4 introduced by GmGlyA3B4_T03TALE nuclease
gttcatgtacggttgcagatataaacgaagcatagcttatgtatgaggtgtaacaaaattggaaacaatagccatgcaaggtgaagaatgtcaccaactcagaaacccttcttcattgacgtgtccctcactcactctcctctcttcactataaatcgccactcttcgtgttctccacttcaccaactccttcaaacttattaacactttccttagttcaatatggggaagcccttcttcactctctctctttcttccctttgcttgctactcttggaacccgaccaccgcgttgagtccgaaggtggtcttattgaaacatggaactctcaacaccctgagctgcaatgcgccggtgtcactgtttccaaacgcaccctcaaccgcaacggcctccacttgccatcttactcaccttatccccaaatgatcattgtcgttcaaggtgcgtaatattagtaagaagtatttatcagcttaacgtgataacaataatagtaatatgaaatatttattaaatttttataattaatctctgctagaaaatttgattaatcatttttagtagaa

SEQ ID NO: 5961 - DNA, 622 bp, Artificial; identical to SEQ ID NO: 5586
  Mutations within GlyA3B4 introduced by GmGlyA3B4_T03TALE nuclease

SEQ ID NO: 5962 - DNA, 603 bp, Artificial
  Mutations within GlyA3B4 introduced by GmGlyA3B4_T03TALE nuclease
gttcatgtacggttgcagatataaacgaagcatagcttatgtatgaggtgtaacaaaattggaaacaatagccatgcaaggtgaagaatgtcaccaactcagaaacccttcttcattgacgtgtccctcactcactctcctctcttcactataaatcgccactcttcgtgttctccacttcaccaactccttcaaacttattaacactttccttagttcaatatggggaagcccttcttcactctctctctttcttccctttgcttgctactcttgtcgagtgccaactcaacaacctcaacgcgttggaacccgaccaccgcgttgagtcccgaaggtggtcttattgaaacatggaactctcaacaccctgagctgcaatgcgccggtgtcactgtttccaaacgcaccctcaaccgcaacggcctccacttgccatcttactcaccttatcccccaaatgatcattgtcgttcaaggtgcgtaatattagtaagaagtatttatcagcttaacgtgataacaataatagtaatatgaaatatttattaattttttataatttaatctctgctagaaaatttgattaatcatttttagtag

SEQ ID NO: 5963 - DNA, 623 bp, Artificial
  Mutations within GlyA3B4 introduced by GmGlyA3B4_T03TALE nuclease
gttcatgtacggttgcagatataaacgaagcatagcttatgtatgaggtgtaacaaaattggaaacaatagccatgcaaggtgaagaatgtcaccaactcagaaacccttcttcattgacgtgtccctcactcactctcctctcttcactataaatcgccactcttcgtgttctccacttcaccaactccttcaaacttattaacactttccttagttcaatatggggaagcccttcttcactctctctctttcttccctttgcttgctactcttgtcgagtgcatgctttgctattacctccagcaagttcaagtgccaactcaacaacctcaacgcgttggaacccgaccaccgcgttgagtccgaaggtggtcttattgaaacatggaactctcaacaccctgagctgcaatgcgccggtgtcactgtttccaaacgcaccctcaaccgcaacggcctccacttgccatcttactcaccttatccccaaatgatcattgtcgttcaaggtgcgtaatattagtaagaagtatttatcagcttaacgtgataacaataatagtaatatgaaatatttattaaatttttataattaatctctgctagaaaatttgattaatc

SEQ ID NO: 5964 - DNA, 584 bp, Artificial
  Mutations within GlyA3B4 introduced by GmGlyA3B4_T03TALE nuclease
gttcatgtacggttgcagatataaacgaagcatagcttatgtatgaggtgtaacaaaattggaaacaatagccatgcaaggtgaagaatgtcaccaactcagaaacccttcttcattgacgtgtccctcactcactctcctctcttcactataaatcgccactcttcgtgttctccacttcaccaactccttcaaacttattaacactttccttagttcaatatggggaagcccttcttcactctctctctttcttccctttgcttgctactcttgtcgacaaccgcgttgagtccgaaggtggtcttattgaaacatggaactctcaacaccctgagctgcaatgcgccggtgtcactgtttccaaacgcaccctcaaccgcaacggcctccacttgccatcttactcaccttatccccaaatgatcattgtcgttcaaggtgcgtaatattagtaagaagtatttatcagcttaacgtgataacaataatagtaatatgaaatatttattaaattttttataattaatctctgctagaaaatttgattaatcatttttagtagaattttgtttttctcaatc

SEQ ID NO: 5965 - DNA, 642 bp, Artificial
  Mutations within GlyA3B4 introduced by GmGlyA3B4_T03TALE nuclease
gttcatgtacggttgcagatataaacgaagcatagcttatgtatgaggtgtaacaaaaattggaaacaatagccatgcaaggtgaagaatgtcaccaactcagaaacccttcttcattgacgtgtccctcactcactctcctctcttcactataaatcgccactcttcgtgttctccacttcaccaactccttcaaacttattaacactttccttagttcaatatggggaagcccttcttcactctctctctttcttccctttgcttgctactcttgtcgagtgcatgctttgctattacctccaactcaacaacctcaacgcgttggaacccgaccaccgcgttgagtccgaaggtggtcttattgaaacatggaactctcaacaccctgagctgcaatgcgccggtgtcactgtttccaaacgcaccctcaaccgcaacggcctccacttgccatcttactcaccttatccccaaatgatcattgtcgttcaaggtgcgtaaatattagtaagaagtatttatcagcttaacgtgataacaataatagtaatatgaaatatttattaaattttttaataattaatctctgctagaaaatttgattaatcatttttagtagaatttgttttttctcaacta

SEQ ID NO: 5966 - DNA, 660 bp, Artificial
  Mutations within GlyA3B4 introduced by GmGlyA3B4_T03TALE nuclease
  misc_feature (532): n is a or c or t or g
gttcatgtacggttgcagatataaacgaagcatagcttatgtatgaggtgtaacaaaattggaaacaatagccatgcaaggtgaagaatgtcaccaactcagaaacccttcttcattgacgtgtccctcactcactctcctctcttcactataaatcgccactcttcgtgttctccacttcaccaactccttcaaacttattaacactttccttagttcaatatggggaagcccttcttcactctctctctttcttccctttgcttgctactcttgtcgagtgcatgctttgctattacctccagcaagttcgagtgccaactcaacaacctcaacgcgttggaacccgaccaccgcgttgagtccgaaggtggtcttattgaaacatggaactctcaacaccctgagctgcaatgcgccggtgtcactgtttccaaacgcaccctcaaccgcaacggcctccacttgccatcttactcaccttatccccaaatgatcattgtcgttcaaggtgcgtaatattagtaagagnatttatcagcttaacgtgataacaatatagtaatatgaaatatttattaaatttttataattaatctctgctagaaaatttgattaatcattttagtagaatttgtttttctcaactaggtttttaaa

SEQ ID NO: 5967 - DNA, 621 bp, Artificial
  Mutations within GlyA3B4 introduced by GmGlyA3B4_T03TALE nuclease
gttcatgtacggttgcagatataaacgaagcatagcttatgtatgaggtgtaacaaaattggaaacaatagccatgcaaggtgaagaatgtcaccaactcagaaacccttcttcattgacgtgtccctcactcactctcctctcttcactataaatcgccactcttcgtgttctccacttcaccaactccttcaaacttattaacactttccttagttcaatatggggaagcccttcttcactctctctctttcttccctttgcttgctactcttgtcgagtgcatgctttgctattattagtaaaggaacccgaccaccgcgttgagtccgaaggtggtcttattgaaacatggaactctcaacaccctgagctgcaatgcgccggtgtcactgtttccaaacgcaccctcaaccgcaacggcctccacttgccatcttactcaccttatccccaaatgatcattgtcgttcaaggtgcgtaatattagtaagaagtatttatcagcttaacgtgataacaataatagtaatatgaaatatttattaaattttttataattaattctctgctagaaaatttgattaatcatttttagtagaatttgttttttctcaacta

SEQ ID NO: 5968 - DNA, 653 bp, Artificial
  Mutations within GlyA3B4 introduced by GmGlyA3B4_T03TALE nuclease
gttcatgtacggttgcagatataaacgaagcatagcttatgtatgaggtgtaacaaaattggaaacaatagccatgcaaggtgaagaatgtcaccaactcagaaacccttcttcattgacgtgtccctcactcactctcctctcttcactataaatcgccactcttcgtgttctccacttcaccaactccttcaaacttattaacactttccttagttcaatatggggaagcccttcttcactctctctctttcttccctttgcttgctactcttgtcgagtgcatgctttgctattacctccagcaagccaactcaacaacctcaacgcgttggaacccgaccaccgcgttgagtccgaaggtggtcttattgaaacatggaactctcaacaccctgagctgcaatgcgccggtgtcactgtttccaaacgcaccctcaaccgcaacggcctccacttgccatcttactcaccttatccccaaatgatcattgtcgttcaaggtgcgtaatattagtaagaagtatttatcagcttaacgtgataacaatatagtaatatgaaatatttattaaatttttataattaatctctgctagaaaatttgattaatcattttagtagaatttgtttttctcaactaggttttaaaa

SEQ ID NO: 5969 - DNA, 619 bp, Artificial; identical to SEQ ID NO: 5761
  Mutations within GlyA3B4 introduced by GmGlyA3B4_T03TALE nuclease

SEQ ID NO: 5970 - DNA, 664 bp, Artificial
  Mutations within GlyA3B4 introduced by GmGlyA3B4_T03TALE nuclease
gttcatgtacggttgcagatataaacgaagcatagcttatgtatgaggtgtaacaaaattggaaacaatagccatgcaaggtgaagaatgtcaccaactcagaaacccttcttcattgacgtgtccctcactcactctcctctcttcactataaatcgccactcttcgtgttctccacttcaccaactccttcaaacttattaacactttccttagttcaatatggggaagcccttcttcactctctctctttcttccctttgcttgctactcttgtcgagtgcatgctttgctattacctccagcaagttctgccaactcaacaacctcaacgcgttggaacccgaccaccgcgttgagtccgaaggtggtcttattgaaacatggaactctcaacaccctgagctgcaatgcgccggtgtcactgtttccaaacgcaccctcaaccgcaacggcctccacttgccatcttactcaccttatccccaaatgatcattgtcgttcaaggtgcgtaatattagtaagaagtatttatcagcttaacgtgataacaataatagtaatatgaaatatttattaaatttttataattaatctctgctagaaaatttgattaatcattttagtagaatttgtttttctcaactaggttttaaaacacca

SEQ ID NO: 5971 - DNA, 556 bp, Artificial
  Mutations within GlyA3B4 introduced by GmGlyA3B4_T03TALE nuclease
gttcatgtacggttgcagatataaacgaagcatagcttatgtatgaggtgtaacaaaattggaaacaatagccatgcaaggtgaagaatgtcaccaactcagaaacccttcttcattgacgtgtccctcactcactctcctctcttcactataaatcgccactcttcgtgttctccacttcaccaactccttcaaacttattaacactttccttagttcaatatggggaagcccttcttcactctctctctttcttccctttgcttgctactcttgtcgagtgcatgctttgctattacctctcaacaccctgagctgcaatgcgccggtgtcactgtttccaaacgcaccctcaaccgcaacggcctccacttgccatcttactcaccttatccccaaatgatcattgtcgttcaaggtgcgtaatattagtaagaagtatttatcagcttaacgtgataacaataatagtaatatgaaatatttattaaattttttataattaatctctgctagaaaatttgattaatcatttttagtagaatttgtttttctc

SEQ ID NO: 5972 - DNA, 637 bp, Artificial
  Mutations within GlyA3B4 introduced by GmGlyA3B4_T03TALE nuclease
gttcatgtacggttgcagatataaacgaagcatagcttatgtatgaggtgtaacaaaattggaaacaatagccatgcaaggtgaagaatgtcaccaactcagaaacccttcttcattgacgtgtccctcactcactctcctctcttcactataaatcgccactcttcgtgttctccacttcaccaactccttcaaacttattaacactttccttagttcaatatggggaagcccttcttcactctctctctttcttccctttgcttgctactcttgtcgagtgcatgctttgctattacctccagcaagagtgccaactcaacaacctcaacgcgttggaacccgaccaccgcgttgagtccgaaggtggtcttattgaaacatggaactctcaacaccctgagctgcaatgcgccggtgtcactgtttccaaacgcaccctcaaccgcaacggcctccacttgccatcttactcaccttatcccccaaatgatcattgtcgttcaaggtgcgtaatattagtaagaagtatttatcagcttaacgtgataacaataatagtaatatgaaatatttattaaatttttataaattaatctctgctagaaaatttgattaatcattttagtagaatttg

SEQ ID NO: 5973 - DNA, 647 bp, Artificial; identical to SEQ ID NO: 5103
  Mutations within GlyA3B4 introduced by GmGlyA3B4_T03TALE nuclease

SEQ ID NO: 5974 - DNA, 620 bp, Artificial; identical to SEQ ID NO: 5727
  Mutations within GlyA3B4 introduced by GmGlyA3B4_T03TALE nuclease

SEQ ID NO: 5975 - DNA, 663 bp, Artificial
  Mutations within GlyA3B4 introduced by GmGlyA3B4_T03TALE nuclease
gttcatgtacggttgcagatataaacgaagcatagcttatgtatgaggtgtaacaaaattggaaacaatagccatgcaaggtgaagaatgtcaccaactcagaaacccttcttcattgacgtgtccctcactcactctcctctcttcactataaatcgccactcttcgtgttctccacttcaccaactccttcaaacttattaacactttccttagttcaatatggggaagcccttcttcactctctctctttcttccctttgcttgctactcttgtcgagtgcatgctttgctattacctccagcaagagtgccaactcaacaacctcaacgcgttggaacccgaccaccgcgttgagtccgaaggtggtcttattgaaacatggaactctcaacaccctgagctgcaatgcgccggtgtcactgtttccaaacgcaccctcaaccgcaacggcctccacttgccatcttactcaccttatccccaaatgatcattgtcgttcaaggtgcgtaatattagtaagaagtatttatcagcttaacgtgataacaataatagtaatatgaaatatttattaaatttttataatttaatctctgctagaaaatttgattaatcattttagtagaatttgttttctcaactaggttttaaaacacca

SEQ ID NO: 5976 - DNA, 650 bp, Artificial
  Mutations within GlyA3B4 introduced by GmGlyA3B4_T03TALE nuclease
gttcatgtacggttgcagatataaacgaagcatagcttatgtatgaggtgtaacaaaattggaaacaatagccatgcaaggtgaagaatgtcaccaactcagaaacccttcttcattgacgtgtccctcactcactctcctctcttcactataaatcgccactcttcgtgttctccacttcaccaactccttcaaacttattaacactttccttagttcaatatggggaagcccttcttcactctctctctttcttccctttgcttgctactcttgtcgagtgcatgctttgctattacctccagcaagtagtgccaactcaacaacctcaacgcgttggaacccgaccaccgcgttgagtccgaaggtggtcttattgaaacatggaactctcaacaccctgagctgcaatgcgccggtgtcactgtttccaaacgcaccctcaaccgcaacggcctccacttgccatcttactcaccttatccccaaatgatcattgtcgttcaaggtgcgtaatattagtaagaagtatttatcagcttaacgtgataacaatatagtaatatgaaatatttattaaatttttataattaatctctgctagaaaatttgattaatcattttagtagaatttgtttttctaaactagg

SEQ ID NO: 5977 - DNA, 644 bp, Artificial; identical to SEQ ID NO: 5735
  Mutations within GlyA3B4 introduced by GmGlyA3B4_T03TALE nuclease

SEQ ID NO: 5978 - DNA, 638 bp, Artificial; identical to SEQ ID NO: 5139
  Mutations within GlyA3B4 introduced by GmGlyA3B4_T03TALE nuclease

SEQ ID NO: 5979 - DNA, 571 bp, Artificial
  Mutations within GlyA3B4 introduced by GmGlyA3B4_T03TALE nuclease
gttcatgtacggttgcagatataaacgaagcatagcttatgtatgaggtgtaacaaaattggaaacaatagccatgcaaggtgaagaatgtcaccaactcagaaacccttcttcattgacgtgtccctcactcactctcctctcttcactataaatcgccactcttcgtgttctccacttcaccaactccttcaaacttattaacactttccttagttcaatatggggaagcccttcttcactctctctctttcttccctttgcttgctactcttgtcgagtgccaactcaacaacctcaacgcgttggaacccgaccaccgcgttgagtccgaaggtggtcttattgaaacatggaactctcaacaccctgagctgcaatgcgccggtgtcactgtttccaaacgcaccctcaaccgcaacggcctccacttgccatcttactcaccttatccccaaatgatcattgtcgttcaaggtgcgtaatattagtaagaagtatttatcagcttaacgtgataacaataatagtaatatgaaatatttattaaatttttataattaatctctgc

SEQ ID NO: 5980 - DNA, 575 bp, Artificial
  Mutations within GlyA3B4 introduced by GmGlyA3B4_T03TALE nuclease
gttcatgtacggttgcagatataaacgaagcatagcttatgtatgaggtgtaacaaaattggaaacaatagccatgcaaggtgaagaatgtcaccaactcagaaacccttcttcattgacgtgtccctcactcactctcctctcttcactataaatcgccactcttcgtgttctccacttcaccaactccttcaaacttattaacactttccttagttcaatatggggaagcccttcttcactctctctctttcttcccgaccaccgcgttgagtccgaaggtggtcttattgaaacatggaactctcaacaccctgagctgcaatgcgccggtgtcactgtttccaaacgcaccctcaaccgcaacggcctccacttgccatcttactcaccttatccccaaatgatcattgtcgttcaaggtgcgtaatattagtaagaagtatttatcagcttaacgtgataacaataatagtaatatgaaatatttattaaattttttataattaatctctgctagaaaatttgattaatcattttagtagaatttgtttttctcaactaggttttaaaca

SEQ ID NO: 5981 - DNA, 662 bp, Artificial
  Mutations within GlyA3B4 introduced by GmGlyA3B4_T03TALE nuclease
gttcatgtacggttgcagatataaacgaagcatagcttatgtatgaggtgtaacaaaattggaaacaatagccatgcaaggtgaagaatgtcaccaactcagaaacccttcttcattgacgtgtccctcactcactctcctctcttcactataaatcgccactcttcgtgttctccacttcaccaactccttcaaacttattaacactttccttagttcaatatggggaagcccttcttcactctctctctttcttccctttgcttgctactcttgtcgagtgcatgctttgctattacctccagcaagttgagtgccaactcaacaacctcaacgcgttggaacccgaccaccgcgttgagtccgaaggtggtcttattgaaacatggaactctcaacaccctgagctgcaatgcgccggtgtcactgtttccaaacgcaccctcaaccgcaacggcctccacttgccatcttactcaccttatcccccaaatgatcattgtcgttcaaggtgcgtaatattagtaagaagtatttatcagcttaacgtgataacaataatagtaatatgaaatatttattaaatttttataattaatctctgctagaaaatttgattaatcattttagtagaatttgtttttctcaactaggttttaaaa

SEQ ID NO: 5982 - DNA, 645 bp, Artificial; identical to SEQ ID NO: 5301
  Mutations within GlyA3B4 introduced by GmGlyA3B4_T03TALE nuclease

SEQ ID NO: 5983 - DNA, 663 bp, Artificial
  Mutations within GlyA3B4 introduced by GmGlyA3B4_T03TALE nuclease
gttcatgtacggttgcagatataaacgaagcatagcttatgtatgaggtgtaacaaaattggaaacaatagccatgcaaggtgaagaatgtcaccaactcagaaacccttcttcattgacgtgtccctcactcactctcctctcttcactataaatcgccactcttcgtgttctccacttcaccaactccttcaaacttattaacactttccttagttcaatatggggaagcccttcttcactctctctctttcttccctttgcttgctactcttgtcgagtgcatgctttgctattacctccagcaagttcgtgccaactcaacaacctcaacgcgttggaacccgaccaccgcgttgagtccgaaggtggtcttattgaaacatggaactctcaacaccctgagctgcaatgcgccggtgtcactgtttccaaacgcaccctcaaccgcaacggcctccacttgccatcttactcaccttatccccaaatgatcattgtcgttcaaggtgcgtaatattagtaagaagtatttatcagcttaacgtgataacaataatagtaatatgaaatatttattaaatttttataattaatctctgctagaaaatttgattaatcattttagtagaatttgttttctcaactaggttttaaacacca

SEQ ID NO: 5984 - DNA, 645 bp, Artificial
  Mutations within GlyA3B4 introduced by GmGlyA3B4_T03TALE nuclease
gttcatgtacggttgcagatataaacgaagcatagcttatgtatgaggtgtaacaaaattggaaacaatagccatgcaaggtgaagaatgtcaccaactcagaaacccttcttcattgacgtgtccctcactcactctcctctcttcactataaatcgccactcttcgtgttctccacttcaccaactccttcaaacttattaacactttccttagttcaatatggggaagcccttcttcactctctctctttcttccctttgcttgctactcttgtcgagtgcatgctttgctattacctccagcaagtagtgccaactcaacaacctcaacgcgttggaacccgaccaccgcgttgagtccgaaggtggtcttattgaaacatggaactctcaacaccctgagctgcaatgcgccggtgtcactgtttccaaacgcaccctcaccgcaacggcctccacttgccatcttactcaccttatccccaaatgatcattgtcgttcaaggtgcgtaatattagtaagaagtatttatcagcttaacgtgataacaataatagtaatatgaaatatttattaaatttttataatttaatctctgctagaaaatttgattaatcattttagtagaatttgttttctcaa

SEQ ID NO: 5985 - DNA, 617 bp, Artificial
  Mutations within GlyA3B4 introduced by GmGlyA3B4_T03TALE nuclease
gttcatgtacggttgcagatataaacgaagcatagcttatgtatgaggtgtaacaaaattggaaacaatagccatgcaaggtgaagaatgtcaccaactcagaaacccttcttcattgacgtgtccctcactcactctcctctcttcactataaatcgccactcttcgtgttctccacttcaccaactccttcaaacttattaacactttccttagttcaatatggggaagcccttcttcactctctctctttcttccctttgcttgctactcttgtcgagtgcatgctttgctattacctccagcaagttccaactcaacaacctcaacgcgttggaacccgaccaccgcgttgagtccgaaggtggtcttattgaaacatggaactctcaacaccctgagctgcaatgcgccggtgtcactgtttccaaacgcaccctcaaccgcaacggcctccacttgccatcttactcaccttatccccaaatgatcattgtcgttcaaggtgcgtaatattagtaagaagtatttatcagcttaacgtgataacaatatagtaatatgaaatatttattaaatttttataattaatctctgctagaaaatttgattaatca

SEQ ID NO: 5986 - DNA, 584 bp, Artificial
  Mutations within GlyA3B4 introduced by GmGlyA3B4_T03TALE nuclease
gttcatgtacggttgcagatataaacgaagcatagcttatgtatgaggtgtaacaaaattggaaacaatagccatgcaaggtgaagaatgtcaccaactcagaaacccttcttcattgacgtgtccctcactcactctcctctcttcactataaatcgccactcttcgtgttctccacttcaccaactccttcaaacttattaacactttccttagttcaatatggggaagcccttcttcactctctctctttcttccctttgcttgctactcttgtcgagtgcatgctttgctattacctccagcaatcaacaacctcaacgcgttggaacccgaccaccgcgttgagtccgaaggtggtcttattgaaacatggaactctcaacaccctgagctgcaatgcgccggtgtcactgtttccaaacgcaccctcaaccgcaacggcctccacttgccatcttactcaccttatccccaaatgatcattgtcgttcaaggtgcgtaatattagtaagaagtatttatcagcttaacgtgataacaataatagtaatatgaaatatttattaaatttttataattaa

SEQ ID NO: 5987 - DNA, 644 bp, Artificial; identical to SEQ ID NO: 5735
  Mutations within GlyA3B4 introduced by GmGlyA3B4_T03TALE nuclease

SEQ ID NO: 5988 - DNA, 667 bp, Artificial
  Mutations within GlyA3B4 introduced by GmGlyA3B4_T03TALE nuclease
gttcatgtacggttgcagatataaacgaagcatagcttatgtatgaggtgtaacaaaattggaaacaatagccatgcaaggtgaagaatgtcaccaactcagaaacccttcttcattgacgtgtccctcactcactctcctctcttcactataaatcgccactcttcgtgttctccacttcaccaactccttcaaacttattaacactttccttagttcaatatggggaagcccttcttcactctctctctttcttccctttgcttgctactcttgtcgagtgcatgctttgctattacctccagcaagttcaaagtgccaactcaacaacctcaacgcgttggaacccgaccaccgcgttgagtccgaaggtggtcttattgaaacatggaactctcaacaccctgagctgcaatgcgccggtgtcactgtttccaaacgcaccctcaaccgcaacggcctccacttgccatcttactcaccttatccccaaatgatcattgtcgttcaaggtgcgtaatattagtaagaagtatttatcagcttaacgtgataacaataatagtaatatgaaatatttattaaatttttataattaatctctgctagaaaatttgattaatcattttagtagaatttgttttctcaactaggttttaaaacacca

SEQ ID NO: 5989 - DNA, 447 bp, Artificial
  Mutations within GlyA3B4 introduced by GmGlyA3B4_T03TALE nuclease
gttcatgtacggttgcagatataaacgaagcatagcttatgtatgaggtgtaacaaaattggaaacaatagccatgcaaggtgaagaatgtcaccaactcaacaacctcaacgcgttggaacccgaccaccgcgttgagtccgaaggtggtcttattgaaacatggaactctcaacaccctgagctgcaatgcgccggtgtcactgtttccaaacgcaccctcaaccgcaacggcctccacttgccatcttactcaccttatcccccaaatgatcattgtcgttcaaggtgcgtaatattagtaagaagtatttatcagcttaacgtgataacaataatagtaatatgaaatatttattaaattttttataattaatctctgctagaaaatttgattaatcatttttagtagaattttgttttttctcaactaggttttaaacacca

SEQ ID NO: 5990 - DNA, 660 bp, Artificial
  Mutations within GlyA3B4 introduced by GmGlyA3B4_T03TALE nuclease
gttcatgtacggttgcagatataaacgaagcatagcttatgtatgaggtgtaacaaaattggaaacaatagccatgcaaggtgaagaatgtcaccaactcagaaacccttcttcattgacgtgtccctcactcactctcctctcttcactataaatcgccactcttcgtgttctccacttcaccaactccttcaaacttattaacactttccttagttcaatatggggaagcccttcttcactctctctctttcttccctttgcttgctactcttgtcgagtgcatgctttgctattacctccagcaagtcaacaacctcaacgcgttggaacccgaccaccgcgttgagtccgaaggtggtcttattgaaacatggaactctcaacaccctgagctgcaatgcgccggtgtcactgtttccaaacgcaccctcaaccgcaacggcctccacttgccatcttactcaccttatcccccaaatgatcattgtcgttcaaggtgcgtaatattagtaagaagtatttatcagctttaacgtgataacaataatagtaatatgaaatatttattaaattttttataattaatctctgctagaaaatttgattaatcatttttagtagaatttgttttttctcaactaggttttaaacaccaca

SEQ ID NO: 5991 - DNA, 637 bp, Artificial; identical to SEQ ID NO: 5307
  Mutations within GlyA3B4 introduced by GmGlyA3B4_T03TALE nuclease

SEQ ID NO: 5992 - DNA, 640 bp, Artificial; identical to SEQ ID NO: 5221
  Mutations within GlyA3B4 introduced by GmGlyA3B4_T03TALE nuclease

SEQ ID NO: 5993 - DNA, 655 bp, Artificial
  Mutations within GlyA3B4 introduced by GmGlyA3B4_T03TALE nuclease
gttcatgtacggttgcagatataaacgaagcatagcttatgtatgaggtgtaacaaaattggaaacaatagccatgcaaggtgaagaatgtcaccaactcagaaacccttcttcattgacgtgtccctcactcactctcctctcttcactataaatcgccactcttcgtgttctccacttcaccaactccttcaaacttattaacactttccttagttcaatatggggaagcccttcttcactctctctctttcttccctttgcttgctactcttgtcgagtgcatgctttgctattacctccagcaagtgccaactcaacaacctcaacgcgttggaacccgaccaccgcgttgagtccgaaggtggtcttattgaaacatggaactctcaacaccctgagctgcaatgcgccggtgtcactgtttccaaacgcaccctcaaccgcaacggcctccacttgccatcttactcaccttatccccaaatgatcattgtcgttcaaggtgcgtaatattagtaagaagtatttatcagcttaacgtgataacaataatagtaatatgaaatatttattaaatttttataattaatctctgctagaaaatttgattaatcattttagtagaatttgttttctcaactaggttttaaaa

SEQ ID NO: 5994 - DNA, 637 bp, Artificial; identical to SEQ ID NO: 5000
  Mutations within GlyA3B4 introduced by GmGlyA3B4_T03TALE nuclease
  misc_feature (532): n is a or c or t or g

SEQ ID NO: 5995 - DNA, 656 bp, Artificial
  Mutations within GlyA3B4 introduced by GmGlyA3B4_T03TALE nuclease
gttcatgtacggttgcagatataaacgaagcatagcttatgtatgaggtgtaacaaaattggaaacaatagccatgcaaggtgaagaatgtcaccaactcagaaacccttcttcattgacgtgtccctcactcactctcctctcttcactataaatcgccactcttcgtgttctccacttcaccaactccttcaaacttattaacactttccttagttcaatatggggaagcccttcttcactctctctctttcttccctttgcttgctactcttgtcgagtgcatgctttgctattacctccagcaagttcaacgccaactcaacaacctcaacgcgttggaacccgaccaccgcgttgagtccgaaggtggtcttattgaaacatggaactctcaacaccctgagctgcaatgcgccggtgtcactgtttccaaacgcaccctcaaccgcaacggcctccacttgccatcttactcaccttatccccaaatgatcattgtcgttcaaggtgcgtaatattagtaagagtatttatcagcttaacgtgataacaataatagtaatatgaaatatttattaaatttttataattaatctctgctagaaaatttgattaatcattttagtagaatttgtttttctcaactaggtttt

SEQ ID NO: 5996 - DNA, 569 bp, Artificial
  Mutations within GlyA3B4 introduced by GmGlyA3B4_T03TALE nuclease
gttcatgtacggttgcagatataaacgaagcatagcttatgtatgaggtgtaacaaaattggaaacaatagccatgcaaggtgaagaatgtcaccaactcagaaacccttcttcattgacgtgtccctcactcactctcctctcttcactataaatcgccactcttcgtgttctccacttcaccaactccttcaaacttattaacactttccttagttcaatatggggaagcccttcttcactctctctctttcttccctttgcttgctaataagatgattagccccattgcgtaaatattgcacttggaaccccgaccaccgcgttgagtccgaaggtggtcttattgaaacatggaactctcaacaccctgagctgcaatgcgccggtgtcactgtttccaaacgcaccctcaaccgcaacggcctccacttgccatcttactcaccttatccccaaatgatcattgtcgttcaaggtgcgtcaatattagtaagaagtatttatcagcttaacgtgataacaataatagtaatatgaatatttattaatttttataattaatctct

SEQ ID NO: 5997 - DNA, 665 bp, Artificial; identical to SEQ ID NO: 4933
  Mutations within GlyA3B4 introduced by GmGlyA3B4_T03TALE nuclease
  misc_feature (532): n is a or c or t or g

SEQ ID NO: 5998 - DNA, 627 bp, Artificial
  Mutations within GlyA3B4 introduced by GmGlyA3B4_T03TALE nuclease
gttcatgtacggttgcagatataaacgaagcatagcttatgtatgaggtgtaacaaaattggaaacaatagccatgcaaggtgaagaatgtcaccaactcagaaacccttcttcattgacgtgtccctcactcactctcctctcttcactataaatcgccactcttcgtgttctccacttcaccaactccttcaaacttattaacactttccttagttcaatatggggaagcccttcttcactctctctctttcttccctttgcttgctactcttgtcgagtgcatgctttgctattacctccagcaactcaacaacctcaacgcgttggaacccgaccaccgcgttgagtccgaaggtggtcttattgaaacatggaactctcaacaccctgagctgcaatgcgccggtgtcactgtttccaaacgcaccctcaaccgcaacggcctccacttgccatcttactcaccttatccccaaatgatcattgtcgttcaaggtgcgtaatattagtaagaagtatttatcagcttaacgtgataacaataatagtaatatgaaaatatttattaaatttttataattaatctctgctagaaaatttgattaatcattttagtagaatttg

SEQ ID NO: 5999 - DNA, 619 bp, Artificial
  Mutations within GlyA3B4 introduced by GmGlyA3B4_T03TALE nuclease
gttcatgtacggttgcagatataaacgaagcatagcttatgtatgaggtgtaacaaaattggaaacaatagccatgcaaggtgaagaatgtcaccaactcagaaacccttcttcattgacgtgtccctcactcactctcctctcttcactataaatcgccactcttcgtgttctccacttcaccaactccttcaaacttattaacactttccttagttcaatatggggaagcccttcttcactctctctctttcttccctttgcttgctactcttgtcgagtgcatgctttgctattacctccagcaagttcaaactcaacaacctcaacgcgttggaacccgaccaccgcgttgagtccgaaggtggtcttattgaaacatggaactctcaacaccctgagctgcaatgcgccggtgtcactgtttccaaacgcaccctcaaccgcaacggcctccacttgccatcttactcaccttatccccaaatgatcattgtcgttcaaggtgcgtaatattagtaagaagtatttatcagcttaacgtgataacaataatagtaatatgaaatatttattaaatttttataatttaatctctgctagaaaatttgattaatca

SEQ ID NO: 6000 - DNA, 560 bp, Artificial
  Mutations within GlyA3B4 introduced by GmGlyA3B4_T03TALE nuclease
gttcatgtacggttgcagatataaacgaagcatagcttatgtatgaggtgtaacaaaattggaaacaatagccatgcaaggtgaagaatgtcaccaactcagaaacccttcttcattgacgtgtccctcactcactctcctctcttcactataaatcgccactcttcgtgttctccacttcaccaactccttcaaacttattaacactttccttagttcaatatggggaagcccttcttcactctctctctttcttccctttgcttgctactcttgtcgagtgcatgctttgctattaaaacatggactcactgagtccgaaggtggtcttattgaaacatggaactctcaacaccctgagctgcaatgcgccggtgtcactgtttccaaacgcaccctcaaccgcaacggcctccacttgccatcttactcaccttatccccaaatgatcattgtcgttcaaggtgcgtaatattagtaagaagtatttatcagcttaacgtgataacaataatagtaatatgaaatatttattaatttttataattaatctctgctag

SEQ ID NO: 6001 - DNA, 509 bp, Artificial
  Mutations within GlyA3B4 introduced by GmGlyA3B4_T03TALE nuclease
gttcatgtacggttgcagatataaacgaagcatagcttatgtatgaggtgtaacaaaattggaaacaatagccatgcaaggtgaagaatgtcaccaactcagaaacccttcttcattgacgtgtccctcactcactctcctctcttcactataaatcgccactcttcgtgttctccacttcaccaactccttcaaacttattaacactttccttagttcaatatggggaagcccttcttcactctctctctttcttccctttgcttgctatcaccaactcaacaacctcaacgcgttggaacccgaccaccgcgttgagtccgaaggtggtcttattgaaacatggaactctcaacaccctgagctgcaatgcgccggtgtcactgtttccaaacgcaccctcaaccgcaacggcctccacttgccatcttactcaccttatccccaaatgatcattgtcgttcaaggtgcgtaatattagtaagaagtatttatcagcttaacgtgat

SEQ ID NO: 6002 - DNA, 589 bp, Artificial
  Mutations within GlyA3B4 introduced by GmGlyA3B4_T03TALE nuclease
gttcatgtacggttgcagatataaacgaagcatagcttatgtaatgaggtgtaacaaaaattggaaacaatagccatgcaaggtgaagaatgtcaccaactcagaaaccccttcttcattgacgtgtccctcactcactctcctctcttcactataaatcgccactcttcgtgttctccacttcaccaactccttcaaacttattaacactttccttagttcaatatggggaagcccttcttcactctctctctttcttccctttgcttgctactcttgtcgagtgcatgctttgctattacctccagcagtgccaactcaacaacctcaacgcgttggaacccgaccaccgcgttgagtccgaaggtggtcttattgaaacatggaactctcaacaccctgagctgcaatgcgccggtgtcactgtttccaaacgcaccctcaaccgcaacggcctccacttgccatcttactcaccttatccccaaatgatcattgtcgttcaaggtgcgtaatattagtaagaagtatttatcagcttaacgtgataacaatatagtaatatgaaatatttattaaatttttataa

SEQ ID NO: 6003 - DNA, 619 bp, Artificial
  Mutations within GlyA3B4 introduced by GmGlyA3B4_T03TALE nuclease
gttcatgtacggttgcagatataaacgaagcatagcttatgtatgaggtgtaacaaaattggaaacaatagccatgcaaggtgaagaatgtcaccaactcagaaacccttcttcattgacgtgtccctcactcactctcctctcttcactataaatcgccactcttcgtgttctccacttcaccaactccttcaaacttattaacactttccttagttcaatatggggaagcccttcttcactctctctctttcttccctttgcttgctactcttgtcgagtgcatgctttgctattacctccagcaaagtgccaactcaacaacctcaacgcgttggaacccgaccaccgcgttgagtccgaaggtggtcttattgaaacatggaactctcaacaccctgagctgcaatgcgccggtgtcactgtttccaaacgcaccctcaaccgcaacggcctccacttgccatcttactcaccttatccccaaatgatcattgtcgttcaaggtgcgtaatattagtaagaagtatttatcagcttaacgtgataacaataatagtaatatgaaatatttattaaatttttataattaatctctgctagaaaatttgattaatca

SEQ ID NO: 6004 - DNA, 655 bp, Artificial
  Mutations within GlyA3B4 introduced by GmGlyA3B4_T03TALE nuclease
gttcatgtacggttgcagatataaacgaagcatagcttatgtatgaggtgtaacaaaattggaaacaatagccatgcaaggtgaagaatgtcaccaactcagaaacccttcttcattgacgtgtccctcactcactctcctctcttcactataaatcgccactcttcgtgttctccacttcaccaactccttcaaacttattaacactttccttagttcaatatggggaagcccttcttcactctctctctttcttccctttgcttgctactcttgtcgagtgcatgctttgctattacctccagcaagttcagtgccaactcaacaacctcaacgcgttggaacccgaccaccgcgttgagtccgaaggtggtcttattgaaacatggaactctcaacaccctgagctgcaatgcgccggtgtcactgtttccaaacgcaccctcaaccgcaacggcctccacttgccatcttactcaccttatccccaaatgatcattgtcgttcaaggtgcgtaatattagtaagaagtatttatcagcttaacgtgataacaatatagtaatatgaaatatttattaaatttttataattaatctctgctagaaaatttgattaatcattttagtagaatttgttttctcaactaggtttt

SEQ ID NO: 6005 - DNA, 643 bp, Artificial
  Mutations within GlyA3B4 introduced by GmGlyA3B4_T03TALE nuclease
gttcatgtacggttgcagatataaacgaagcatagcttatgtatgaggtgtaacaaaattggaaacaatagccatgcaaggtgaagaatgtcaccaactcagaaacccttcttcattgacgtgtccctcactcactctcctctcttcactataaatcgccactcttcgtgttctccacttcaccaactccttcaaacttattaacactttccttagttcaatatggggaagcccttcttcactctctctctttcttccctttgcttgctactcttgtcgagtgcatgctttgctattacctccagcaagtgcaatctacaacaacctcaacgcgttggaacccgaccaccgcgttgagtccgaaggtggtcttattgaaacatggaactctcaacaccctgagctgcaatgcgccggtgtcactgtttccaaacgcaccctcaaccgcaacggcctccacttgccatcttactcaccttatccccaaatgatcattgtcgttcaaggtgcgtaatattagtaagaagtatttatcagcttaacgtgataacaataatagtaatatgaaatatttattaaatttttataattaatctctgctagaaaatttgattaatcattttagtagaatttgttttctcaa

SEQ ID NO: 6006 - DNA, 666 bp, Artificial
  Mutations within GlyA3B4 introduced by GmGlyA3B4_T03TALE nuclease
gttcatgtacggttgcagatataaacgaagcatagcttatgtatgaggtgtaacaaaattggaaacaatagccatgcaaggtgaagaatgtcaccaactcagaaacccttcttcattgacgtgtccctcactcactctcctctcttcactataaatcgccactcttcgtgttctccacttcaccaactccttcaaacttattaacactttccttagttcaatatggggaagcccttcttcactctctctctttcttccctttgcttgctactcttgtcgagtgcatgctttgctattacctccagcaagttcagtgccaactcaacaacctcaacgcgttggaacccgaccaccgcgttgagtccgaaggtggtcttattgaaacatggaactctcaacaccctgagctgcaatgcgccggtgtcactgtttccaaacgcaccctcaaccgcaacggcctccacttgccatcttactcaccttatccccaaatgatcattgtcgttcaaggtgcgtaatattagtaagaagtatttatcagcttaacgtgataacaataatagtaatatgaaatatttattaaatttttataattaatctctgctagaaaatttgattaatcattttagtagaatttgtttttctcaactaggttttaaaacacca

SEQ ID NO: 6007 - DNA, 640 bp, Artificial
  Mutations within GlyA3B4 introduced by GmGlyA3B4_T03TALE nuclease
gttcatgtacggttgcagatataaacgaagcatagcttatgtatgaggtgtaacaaaattggaaacaatagccatgcaaggtgaagaatgtcaccaactcagaaacccttcttcattgacgtgtccctcactcactctcctctcttcactataaatcgccactcttcgtgttctccacttcaccaactccttcaaacttattaacactttccttagttcaatatggggaagcccttcttcactctctctctttcttccctttgcttgctactcttgtcgagtgcatgctttgctattacctccaggagtgccaactcaacaacctcaacgcgttggaacccgaccaccgcgttgagtccgaaggtggtcttattgaaacatggaactctcaacaccctgagctgcaatgcgccggtgtcactgtttccaaacgcaccctcaaccgcaacggcctccacttgccatcttactcaccttatccccaaatgatcattgtcgttcaaggtgcgtaatattagtaagaagtatttatcagcttaacgtgataacaatatagtaatatgaaatatttattaaatttttataattaatctctgctagaaaatttgattaatcattttagtagaatttgttttctcaa

SEQ ID NO: 6008 - DNA, 583 bp, Artificial
  Mutations within GlyA3B4 introduced by GmGlyA3B4_T03TALE nuclease
gttcatgtacggttgcagatataaacgaagcatagcttatgtatgaggtgtaacaaaattggaaacaatagccatgcaaggtgaagaatgtcaccaactcagaaacccttcttcattgacgtgtccctcactcactctcctctcttcactataaatcgccactcttcgtgttctccacttcaccaactccttcaaacttattaacactttccttagttcaatatggggaagcccttcttcactctctctctttcttccctttgattccatttcaacaacctcaacgcgttggaacccgaccaccgcgttgagtccgaaggtggtcttattgaaacatggaactctcaacaccctgagctgcaatgcgccggtgtcactgtttccaaacgcaccctcaaccgcaacggcctccacttgccatcttactcaccttatccccaaaatgatcattgtcgttcaaggtgcgtaatattagtaagaagtatttatcagcttaacgtgataacaataatagtaatatgaaatatttattaaatttttttataattaatctctgctagaaaatttgattaatcatttttag

SEQ ID NO: 6009 - DNA, 651 bp, Artificial; identical to SEQ ID NO: 5863
  Mutations within GlyA3B4 introduced by GmGlyA3B4_T03TALE nuclease

SEQ ID NO: 6010 - DNA, 659 bp, Artificial
  Mutations within GlyA3B4 introduced by GmGlyA3B4_T03TALE nuclease
gttcatgtacggttgcagatataaacgaagcatagcttatgtatgaggtgtaacaaaattggaaacaatagccatgcaaggtgaagaatgtcaccaactcagaaacccttcttcattgacgtgtccctcactcactctcctctcttcactataaatcgccactcttcgtgttctccacttcaccaactccttcaaacttattaacactttccttagttcaatatggggaagcccttcttcactctctctctttcttccctttgcttgctactcttgtcgagtgcatgctttgctattacctccagcgagtgccaactcaacaacctcaacgcgttggaacccgaccaccgcgttgagtccgaaggtggtcttattgaaacatggaactctcaacaccctgagctgcaatgcgccggtgtcactgtttccaaacgcaccctcaaccacaacggcctccacttgccatcttactcaccttatccccaaatgatcattgtcgttcaaggtgcgtaatattagtaagaagtatttatcagcttaacgtgataacaatatagtaatatgaaatatttattaaatttttataattaatctctgctagaaaatttgattaatcattttagtagaatttgttttctcaactaggttttaaaacacca

SEQ ID NO: 6011 - DNA, 652 bp, Artificial
  Mutations within GlyA3B4 introduced by GmGlyA3B4_T03TALE nuclease
gttcatgtacggttgcagatataaacgaagcatagcttatgtatgaggtgtaacaaaattggaaacaatagccatgcaaggtgaagaatgtcaccaactcagaaacccttcttcattgacgtgtccctcactcactctcctctcttcactataaatcgccactcttcgtgttctccacttcaccaactccttcaaacttattaacactttccttagttcaatatggggaagcccttcttcactctctctctttcttccctttgcttgctactcttgtcgagtgcatgctttgctattacctccagcaagttcagtgccaactcaacaacctcaacgcgttggaacccgaccaccgcgttgagtccgaaggtggtcttattgaaacatggaactctcaacaccctgagctgcaatgcgccggtgtcactgtttccaaacgcaccctcaaccgcaacggcctccacttgccatcttactcaccttatccccaaatgatcattgtcgttcaaggtgcgtaatattagtaagaagtatttatcagcttaacgtgataacaataatagtaatatgaaatatttattaaatttttataattaatctctgctagaaaatttgattaatcattttagtagaatttgttttctcaactagg

SEQ ID NO: 6012 - DNA, 655 bp, Artificial
  Mutations within GlyA3B4 introduced by GmGlyA3B4_T03TALE nuclease
gttcatgtacggttgcagatataaacgaagcatagcttatgtatgaggtgtaacaaaattggaaacaatagccatgcaaggtgaagaatgtcaccaactcagaaacccttcttcattgacgtgtccctcactcactctcctctcttcactataaatcgccactcttcgtgttctccacttcaccaactccttcaaacttattaacactttccttagttcaatatggggaagcccttcttcactctctctctttcttccctttgcttgctactcttgtcgagtgcatgctttgctattacctccagcaaactcaacaacctcaacgcgttggaacccgaccaccgcgttgagtccgaaggtggtcttattgaaacatggaactctcaacaccctgagctgcaatgcgccggtgtcactgtttccaaacgcaccctcaaccgcaacggcctccacttgccatcttactcaccttatccccaaatgatcattgtcgttcaaggtgcgtaatattagtaagaagtatttatcagcttaacgtgataacaataatagtaatatgaaatatttattaaatttttataattaatctctgctagaaaatttgattaatcattttagtagaatttgtttttctcaactaggttttaaaacacca

SEQ ID NO: 6013 - DNA, 631 bp, Artificial
  Mutations within GlyA3B4 introduced by GmGlyA3B4_T03TALE nuclease
gttcatgtacggttgcagatataaacgaagcatagcttatgtatgaggtgtaacaaaattggaaacaatagccatgcaaggtgaagaatgtcaccaactcagaaacccttcttcattgacgtgtccctcactcactctcctctcttcactataaatcgccactcttcgtgttctccacttcaccaactccttcaaacttattaacactttccttagttcaatatggggaagcccttcttcactctctctctttcttccctttgcttgctactcttgtcgagtgccaactcaacaacctcaacgcgttggaacccgaccaccgcgttgagtccgaaggtggtcttattgaaacatggaactctcaacaccctgagctgcaatgcgccggtgtcactgtttccaaacgcaccctcaaccgcaacggcctccacttgccatcttactcaccttatcccccaaatgatcattgtcgttcaaggtgcgtaatattagtaagaagtatttatcagcttaacgtgataacaataatagtaatatgaatatttattaattttttataattaatctctgctagaaaatttgattaatcatttttagtagaatttgtttttctcaactaggtttttaaaca

SEQ ID NO: 6014 - DNA, 647 bp, Artificial
  Mutations within GlyA3B4 introduced by GmGlyA3B4_T03TALE nuclease
gttcatgtacggttgcagatataaacgaagcatagcttatgtatgaggtgtaacaaaattggaaacaatagccatgcaaggtgaagaatgtcaccaactcagaaacccttcttcattgacgtgtccctcactcactctcctctcttcactataaatcgccactcttcgtgttctccacttcaccaactccttcaaacttattaacactttccttagttcaatatggggaagcccttcttcactctctctctttcttccctttgcttgctactcttgtcgagtgcatgctttgctattacctccagcaaggagtgccaactcaacaacctcaacgcgttggaacccgaccaccgcgttgagtccgaaggtggtcttattgaaacatggaactctcaacaccctgagctgcaatgcgccggtgtcactgtttccaaacgcaccctcaaccgcaacggcctccacttgccatcttactcaccttatccccaaatgatcattgtcgttcaaggtgcgtaatattagtaagaagtatttatcagcttaacgtgataacaataatagtaatatgaaatatttattaaatttttataattaatctctgctagaaaatttgattaatcatttttagtagaatttgtttttctcaa

SEQ ID NO: 6015 - DNA, 624 bp, Artificial
  Mutations within GlyA3B4 introduced by GmGlyA3B4_T03TALE nuclease
gttcatgtacggttgcagatataaacgaagcatagcttatgtatgaggtgtaacaaaattggaaacaatagccatgcaaggtgaagaatgtcaccaactcagaaacccttcttcattgacgtgtccctcactcactctcctctcttcactataaatcgccactcttcgtgttctccacttcaccaactccttcaaacttattaacactttccttagttcaatatggggaagcccttcttcactctctctctttcttccctttgcttgctactcttgtcgagtgccaactcaacaacctcaacgcgttggaacccgaccaccgcgttgagtcccgaaggtggtcttattgaaacatggaactctcaacaccctgagctgcaatgcgccggtgtcactgtttccaaaacgcaccctcaaccgcaacggcctccacttgccatcttactcaccttatccccaaatgatcattgtcgttcaaggtgcgtaatattagtaagaagtatttatcagcttaacgtgataacaataatagtaatatgaaatatttattaaattttttataattaatctctgctagaaaatttgattaatcatttttagtagaatttgtttttctcaactagg

SEQ ID NO: 6016 - DNA, 659 bp, Artificial; identical to SEQ ID NO: 5865
  Mutations within GlyA3B4 introduced by GmGlyA3B4_T03TALE nuclease

SEQ ID NO: 6017 - DNA, 590 bp, Artificial
  Mutations within GlyA3B4 introduced by GmGlyA3B4_T03TALE nuclease
gttcatgtacggttgcagatataaacgaagcatagcttatgtatgaggtgtaacaaaaattggaaacaatagccatgcaaggtgaagaatgtcaccaactcagaaacccttcttcattgacgtgtccctcactcactctcctctcttcactataaatcgccactcttcgtgttctccacttcaccaactccttcaaacttattaacactttccttagttcaatatggggaagcccttcttcactctctctctttcttccctttgcttgctactcttgtcgagtgcatgctttgctattacctccagcaagttgagtgccaactcaacaacctcaacgcgttggaacccgaccaccgcgttgagtccgaaggtggtcttattgaaacatggaactctcaacaccctgagctgcaatgcgccggtgtcactgtttccaaacgcaccctcaaccgcaacggcctccacttgccatcttactcaccttatccccaaatgatcattgtcgttcaaggtgcgtaatattagtaagaagtatttatcagcttaacgtgataacaataatagtaatatgaaatatttattaaattttt

SEQ ID NO: 6018 - DNA, 682 bp, Artificial
  Mutations within GlyA3B4 introduced by GmGlyA3B4_T03TALE nuclease
gttcatgtacggttgcagatataaacgaagcatagcttatgtatgaggtgtaacaaaattggaaacaatagccatgcaaggtgaagaatgtcaccaactcagaaacccttcttcattgacgtgtccctcactcactctcctctcttcactataaatcgccactcttcgtgttctccacttcaccaactccttcaaacttattaacactttccttagttcaatatggggaagcccttcttcactctctctctttcttccctttgcttgctactcttgtcgagtgcatgctttgctattacctccagcaagttcacgacaggtttcccgactggaaagcggcggtgagcgcaacgcaatcacacctcaacgcgttggaccgaccacgcgttgagtccgaaggtggtcttattgaacatggactctcaacaccctgagctgcaatgcgccggtgtcactgtttccaaacgcaccctcaaccgcaacggcctccacttgccatcttactcaccttatccccaaatgatcattgtcgttcaaggtgcgtaatattagtaagaagtatttatcagcttaacgtgataacaataatagtaatatgaaatatttattaaatttttataattaatctctgctagaaaatttgattaatcatttttagtagaatttgtttttctcaactagg

SEQ ID NO: 6019 - DNA, 659 bp, Artificial
  Mutations within GlyA3B4 introduced by GmGlyA3B4_T03TALE nuclease
gttcatgtacggttgcagatataaacgaagcatagcttatgtatgaggtgtaacaaaattggaaacaatagccatgcaaggtgaagaatgtcaccaactcagaaacccttcttcattgacgtgtccctcactcactctcctctcttcactataaatcgccactcttcgtgttctccacttcaccaactccttcaaacttattaacactttccttagttcaatatggggaagcccttcttcactctctctctttcttccctttgcttgctactcttgtcgagtgcatgctttgctattacctccagcaagttcgagtgccaactcaacaacctcaacgcgttggaacccgaccaccgcgttgagtccgaaggtggtcttattgaaacatggaactctcaacaccctgagctgcaatgcgccggtgtcactgtttccaaacgcaccctcaaccgcaacggcctccacttgccatcttactcaccttatccccaaatgatcattgtcgttcaaggtgcgtaatattagtaagagtatttatcagcttaacgtgataacaataatagtaatatgaaatatttattaaatttttataattaatctctgctagaaaatttgattaatcattttagtagaatttgttttctcaactaggttttaaa

SEQ ID NO: 6020 - DNA, 660 bp, Artificial
  Mutations within GlyA3B4 introduced by GmGlyA3B4_T03TALE nuclease
gttcatgtacggttgcagatataaacgaagcatagcttatgtatgaggtgtaacaaaaattggaaacaatagccatgcaaggtgaagaatgtcaccaactcagaaacccttcttcattgacgtgtccctcactcactctcctctcttcactataaatcgccactcttcgtgttctccacttcaccaactccttcaaacttattaacactttccttagttcaatatggggaagcccttcttcactctctctctttcttccctttgcttgctactcttgtcgagtgcatgctttgctattacctccagcaagttagtgccaactcaacaacctcaacgcgttggaacccgaccaccgcgttgagtccgaaggtggtcttattgaaacatggaactctcaacaccctgagctgcaatgcgccggtgtcactgtttccaaacgcaccctcaaccgcaacggcctccacttgccatcttactcaccttatccccaaatgatcattgtcgttcaaggtgcgtaatattagtaagaagtatttatcagcttaacgtgataacaataatagtaatatgaaatatttattaaatttttataattaatctctgctagaaaatttgattaatcattttagtagaatttgttttctcaactaggttttaaaa

SEQ ID NO: 6021 - DNA, 560 bp, Artificial
  Mutations within GlyA3B4 introduced by GmGlyA3B4_T03TALE nuclease
gttcatgtacggttgcagatataaacgaagcatagcttatgtatgaggtgtaacaaaattggaaacaatagccatgcaaggtgaagaatgtcaccaactcagaaacccttcttcattgacgtgtccctcactcactctcctctcttcactataaatcgccactcttcgtgttctccacttcaccaactccttcaaacttattaacactttccttagttcaatatggggaagcccttcttcactctctctctttcttccctttgcttgctactcttgtcgagtgcatgctttgctattacctccagcaagttcaacgtttgaaggtggtcttattgaaacatggaactctcaacaccctgagctgcaatgcgccggtgtcactgtttccaaacgcaccctcaaccgcaacggcctccacttgccatcttactcaccttatccccaaatgatcattgtcgttcaaggtgcgtaatattagtaagaagtatttatcagcttaacgtgataacaataatagtaatatgaaatatttattaatttttataattaatctctgctag

SEQ ID NO: 6022 - DNA, 638 bp, Artificial
  Mutations within GlyA3B4 introduced by GmGlyA3B4_T03TALE nuclease
gttcatgtacggttgcagatataaacgaagcatagcttatgtatgaggtgtaacaaaattggaaacaatagccatgcaaggtgaagaatgtcaccaactcagaaacccttcttcattgacgtgtccctcactcactctcctctcttcactataaatcgccactcttcgtgttctccacttcaccaactccttcaaacttattaacactttccttagttcaatatggggaagcccttcttcactctctctctttcttccctttgcttgctactcttgtcgagtgcatgctttgctattacctccagcaagttcaagtgccaactcaacaacctcaacgcgttggaacccgaccaccgcgttgagtccgaaggtggtcttattgaaacatggaactctcaacaccctgagctgcaatgcgccggtgtcactgtttccaaacgcaccctcaaccgcaacggcctccacttgccatcttactcaccttatccccaaatgatcattgtcgttcaaggtgcgtaatattagtaagaagtatttatcagcttaacgtgataacaatatagtaatatgaaatatttattaaatttttataattaatctctgctagaaaatttgattaatcattttagtagaatttg

SEQ ID NO: 6023 - DNA, 644 bp, Artificial
  Mutations within GlyA3B4 introduced by GmGlyA3B4_T03TALE nuclease
gttcatgtacggttgcagatataaacgaagcatagcttatgtatgaggtgtaacaaaattggaaacaatagccatgcaaggtgaagaatgtcaccaactcagaaacccttcttcattgacgtgtccctcactcactctcctctcttcactataaatcgccactcttcgtgttctccacttcaccaactccttcaaacttattaacactttccttagttcaatatggggaagcccttcttcactctctctctttcttccctttgcttgctactcttgtcgagtgcatgctttgctattacctccagcaagtagtgccaactcaacaacctcaacgcgttggaacccgaccaccgcgttgagtccgaaggtggtcttattgaaacatggaactctcaacaccctgagctgcaatgcgccggtgtcactgtttccaaatgcaccctcaaccgcaacggcctccacttgccatcttactcaccttatccccaaatgatcattgtcgttcaaggtgcgtaatattagtaagaagtatttatcagcttaacgtgataacaatatagtaatatgaaatatttattaaatttttataattaatctctgctagaaaatttgattaatcattttagtagaatttgttttctcaa

SEQ ID NO: 6024 - DNA, 628 bp, Artificial
  Mutations within GlyA3B4 introduced by GmGlyA3B4_T03TALE nuclease
gttcatgtacggttgcagatataaacgaagcatagcttatgtatgaggtgtaacaaaattggaaacaatagccatgcaaggtgaagaatgtcaccaactcagaaacccttcttcattgacgtgtccctcactcactctcctctcttcactataaatcgccactcttcgtgttctccacttcaccaactccttcaaacttattaacactttccttagttcaatatggggaagcccttcttcactctctctctttcttccctttgcttgctactcttgtcgaagtgccaactcaacaacctcaacgcgttggaacccgaccaccgcgttgagtccgaaggtggtcttattgaaacatggaactctcaacaccctgagctgcaatgcgccggtgtcactgtttccaaacgcaccctcaaccgcaacggcctccacttgccatcttactcaccttatccccaaatgatcattgtcgttcaaggtgcgtaatattagtaagaagtatttatcagcttaacgtgataacaataatagtaatatgaaatatttattaaattttttataattaatctctgctagaaaatttgattaatcatttttagtagaatttgtttttctcaactaggttttt

SEQ ID NO: 6025 - DNA, 665 bp, Artificial; identical to SEQ ID NO: 4810
  Mutations within GlyA3B4 introduced by GmGlyA3B4_T03TALE nuclease

SEQ ID NO: 6026 - DNA, 646 bp, Artificial
  Mutations within GlyA3B4 introduced by GmGlyA3B4_T03TALE nuclease
gttcatgtacggttgcagatataaacgaagcatagcttatgtatgaggtgtaacaaaattggaaacaatagccatgcaaggtgaagaatgtcaccaactcagaaacccttcttcattgacgtgtccctcactcactctcctctcttcactataaatcgccactcttcgtgttctccacttcaccaactccttcaaacttattaacactttccttagttcaatatggggaagcccttcttcactctctctctttcttccctttgcttgctactcttgtcgagtgcatgctttgctattacctccagcaagtaagtgccaactcaacaacctcaacgcgttggaacccgaccaccgcgttgagtccgaaggtggtcttattgaaacatggaactctcaacaccctgagctgcaatgcgccggtgtcactgtttccaaacgcaccctcaaccgcaacggcctccacttgccatcttactcaccttatccccaaatgatcattgtcgttcaaggtgcgtaatattagtaagaagtatttatcagcttaacgtgataacaataatagtaatatgaaatatttattaaatttttataattaatctctgctagaaaatttgattaatcattttagtagaatttgttttctcaa

SEQ ID NO: 6027 - DNA, 665 bp, Artificial
  Mutations within GlyA3B4 introduced by GmGlyA3B4_T03TALE nuclease
gttcatgtacggttgcagatataaacgaagcatagcttatgtatgaggtgtaacaaaattggaaacaatagccatgcaaggtgaagaatgtcaccaactcagaaacccttcttcattgacgtgtccctcactcactctcctctcttcactataaatcgccactcttcgtgttctccacttcaccaactccttcaaacttattaacactttccttagttcaatatggggaagcccttcttcactctctctctttcttccctttgcttgctactcttgtcgagtgcatgctttgctattacctccagcaagttgtgccaactcaacaacctcaacgcgttggaacccgaccaccgcgttgagtccgaaggtggtcttattgaaacatggaactctcaacaccctgagctgcaatgcgccggtgtcactgtttccaaacgcaccctcaaccgcaacggcctccacttgccatcttactcaccttatccccaaatgatcattgtcgttcaaggtgcgtaatattagtaagaagtatttatcagcttaacgtgataacaataatagtaatatgaaaatatttattaaatttttataattaatctctgctagaaaatttgattaatcattttagtagaatttgtttttctcaactaggttttaaaacacca

SEQ ID NO: 6028 - DNA, 648 bp, Artificial
  Mutations within GlyA3B4 introduced by GmGlyA3B4_T03TALE nuclease
gttcatgtacggttgcagatataaacgaagcatagcttatgtatgaggtgtaacaaaattggaaacaatagccatgcaaggtgaagaatgtcaccaactcagaaacccttcttcattgacgtgtccctcactcactctcctctcttcactataaatcgccactcttcgtgttctccacttcaccaactccttcaaacttattaacactttccttagttcaatatggggaagcccttcttcactctctctctttcttccctttgcttgctactcttgtcgagtgcatgctttgctattacctccagcaagttgtgccaactcaacaacctcaacgcgttggaacccgaccaccgcgttgagtccgaaggtggtcttattgaaacatggaactctcaacaccctgagctgcaatgcgccggtgtcactgtttccaaaacgcaccctcaaccgcaacggcctccacttgccatcttactcaccttatccccaaatgatcattgtcgttcaaggtgcgtaatattagtaagaagtatttatcagcttaacgtgataacaataatagtaatatgaaatatttattaaatttttataattaatctctgctagaaaatttgattaatcatttttagtagaatttgtttttctcaa

SEQ ID NO: 6029 - DNA, 647 bp, Artificial
  Mutations within GlyA3B4 introduced by GmGlyA3B4_T03TALE nuclease
gttcatgtacggttgcagatataaacgaagcatagcttatgtatgaggtgtaacaaaattggaaacaatagccatgcaaggtgaagaatgtcaccaactcagaaacccttcttcattgacgtgtccctcactcactctcctctcttcactataaatcgccactcttcgtgttctccacttcaccaactccttcaaacttattaacactttccttagttcaatatggggaagcccttcttcactctctctctttcttccctttgcttgctactcttgtcgagtgcatgctttgctattacctccagcaagttcgtgccaactcaacaacctcaacgcgttggaacccgaccaccgcgttgagtccgaaggtggtcttattgaaacatggaactctcaacaccctgagctgcaatgcgccggtgtcactgtttccaaacgcaccctcaaccgcaacggcctccacttgccatcttactcaccttatccccaaatgatcattgtcgttcaaggtgcgtaatattagtaagaagtatttatcagcttaacgtgataacaataatagtaatatgaaatatttattaaatttttataattaatctctgctagaaaatttgattaatcattttagtagaatttgtttttctcaa

SEQ ID NO: 6030 - DNA, 625 bp, Artificial
  Mutations within GlyA3B4 introduced by GmGlyA3B4_T03TALE nuclease
gttcatgtacggttgcagatataaacgaagcatagcttatgtatgaggtgtaacaaaattggaaacaatagccatgcaaggtgaagaatgtcaccaactcagaaacccttcttcattgacgtgtccctcactcactctcctctcttcactataaatcgccactcttcgtgttctccacttcaccaactccttcaaacttattaacactttccttagttcaatatggggaagcccttcttcactctctctctttcttccctttgcttgctactcttgtcgagtgcatgctttgctattacctcaacgcgttggaacccgaccaccgcgttgagtccgaaggtggtcttattgaaacatggaactctcaacaccctgagctgcaatgcgccggtgtcactgtttccaaacgcaccctcaaccgcaacggcctccacttgccatcttactcaccttatccccaaatgatcattgtcgttcaaggtgcgtaatattagtaagaagtatttatcagcttaacgtgataacaataatagtaatatgaaatatttattaaattttttataattaattctctgctagaaaatttgattaatcatttttagtagaatttgttttttctcaacta

SEQ ID NO: 6031 - DNA, 520 bp, Artificial
  Mutations within GlyA3B4 introduced by GmGlyA3B4_T03TALE nuclease
gttcatgtacggttgcagatataaacgaagcatagcttatgtatgaggtgtaacaaaattggaaacaatagccatgcaaggtgaagaatgtcaccaactcagaaacccttcttcattgacgtgtccctcactcactctcctctcttcactataaatcgccactcttcgtgttctccacttcaccaactccttcaaacttattaacactttccttagttcaatatggggaagcccttcttcactctctctctttcttccctttgcttgctactcttgtcgagtgccaactcaacaacctcaacgcgttggaacccgaccaccgcgttgagtccgaaggtggtcttattgaaacatggaactctcaacaccctgagctgcaatgcgccggtgtcactgtttccaaaacgcaccctcaaccgcaacggcctccacttgccatcttactcaccttatccccaaatgatcattgtcgttcaaggtgcgtaatattagtaagaagtatttatcagcttaacgtgat

SEQ ID NO: 6032 - DNA, 648 bp, Artificial
  Mutations within GlyA3B4 introduced by GmGlyA3B4_T03TALE nuclease
gttcatgtacggttgcagatataaacgaagcatagcttatgtatgaggtgtaacaaaattggaaacaatagccatgcaaggtgaagaatgtcaccaactcagaaacccttcttcattgacgtgtccctcactcactctcctctcttcactataaatcgccactcttcgtgttctccacttcaccaactccttcaaacttattaacactttccttagttcaatatggggaagcccttcttcactctctctctttcttccctttgcttgctactcttgtcgagtgcatgctttgctattacctccagcaagtttgccaactcaacaacctcaacgcgttggaacccgaccaccgcgttgagtccgaaggtggtcttattgaaacatggaactctcaacaccctgagctgcaatgcgccggtgtcactgtttccaaacgcaccctcaaccgcaacggcctccacttgccatcttactcaccttatccccaaatgatcattgtcgttcaaggtgcgtaatattagtaagaagtatttatcagcttaacgtgataacaatatagtaatatgaaatatttattaaatttttataattaatctctgctagaaaatttgattaatcattttagtagaatttgttttctcaactagg

SEQ ID NO: 6033 - DNA, 659 bp, Artificial
  Mutations within GlyA3B4 introduced by GmGlyA3B4_T03TALE nuclease
gttcatgtacggttgcagatataaacgaagcatagcttatgtatgaggtgtaacaaaattggaaacaatagccatgcaaggtgaagaatgtcaccaactcagaaaccccttcttcattgacgtgtccctcactcactctcctctcttcactataaatcgccactcttcgtgttctccacttcaccaactccttcaaacttattaacactttccttagttcaatatggggaagcccttcttcactctctctctttcttccctttgcttgctactcttgtcgagtgcatgctttgctattacctccagcaagttcgagtgccaactcaacaacctcaacgcgttggaacccgaccaccgcgttgagtccgaaggtggtcttattgaaacatggaactctcaacaccctgagctgcaatgcgccggtgtcactgtttccaaacgcaccctcaaccgcaacggcctccacttgccatcttactcaccttatccccaaatgatcattgtcgttcaaggtgcgtaatattagtaagagtatttatcagcttaacgtgatacaatatagtaatatgaaatatttattaaatttttataattaatctctgctagaaaatttgattaatcattttagtagaatttgtttttctcaactaggttttaaa

SEQ ID NO: 6034 - DNA, 650 bp, Artificial
  Mutations within GlyA3B4 introduced by GmGlyA3B4_T03TALE nuclease
gttcatgtacggttgcagatataaacgaagcatagcttatgtatgaggtgtaacaaaattggaaacaatagccatgcaaggtgaagaatgtcaccaactcagaaaccccttcttcattgacgtgtccctcactcactctcctctcttcactataaatcgccactcttcgtgttctccacttcaccaactccttcaaacttattaacactttccttagttcaatatggggaagcccttcttcactctctctctttcttccctttgcttgctactcttgtcgagtgcatgctttgctattacctccatgccaactcaacaacctcaacgcgttggaacccgaccaccgcgttgagtccgaaggtggtcttattgaaacatggaactctcaacaccctgagctgcaatgcgccggtgtcactgtttccaaacgcaccctcaaccgcaacggcctccacttgccatcttactcaccttatccccaaatgatcattgtcgttcaaggtgcgtaatattagtaagaagtatttatcagcttaacgtgataacaataatagtaatatgaaatatttattaaatttttataattaatctctgctagaaaatttgattaatcatttttagtagaatttgtttttctcaactaggttttt

SEQ ID NO: 6035 - DNA, 661 bp, Artificial
  Mutations within GlyA3B4 introduced by GmGlyA3B4_T03TALE nuclease
gttcatgtacggttgcagatataaacgaagcatagcttatgtatgaggtgtaacaaaattggaaacaatagccatgcaaggtgaagaatgtcaccaactcagaaacccttcttcattgacgtgtccctcactcactctcctctcttcactataaatcgccactcttcgtgttctccacttcaccaactccttcaaacttattaacactttccttagttcaatatggggaagcccttcttcactctctctctttcttccctttgcttgctactcttgtcgagtgcatgctttgctattacctccagcaagttcagtgccaactcaacaacctcaacgcgttggaacccgaccaccgcgttgagtccgaaggtggtcttattggaacatggaactctcaacaccctgagctgcaatgcgccggtgtcactgtttccaaacgcaccctcaaccgcaacggcctccacttgccatcttactcaccttatccccaaatgatcattgtcgttcaaggtgcgtaatattagtaagaagtatttatcagcttaacgtgataacaataatagtaatatgaaatatttattaaatttttataattaatctctgctagaaaatttgattaatcattttagtagaatttgttttctcaactaggtttttaaaa

SEQ ID NO: 6036 - DNA, 653 bp, Artificial
  Mutations within GlyA3B4 introduced by GmGlyA3B4_T03TALE nuclease
gttcatgtacggttgcagatataaacgaagcatagcttatgtatgaggtgtaacaaaattggaaacaatagccatgcaaggtgaagaatgtcaccaactcagaaacccttcttcattgacgtgtccctcactcactctcctctcttcactataaatcgccactcttcgtgttctccacttcaccaactccttcaaacttattaacactttccttagttcaatatggggaagcccttcttcactctctctctttcttccctttgcttgctactcttgtcgagtgctgctttgctattacctccagcaagttcaatcaacgcgttggaacccgaccaccgcgttgagtccgaaggtggtcttattgaaacatggaactctcaacaccctgagctgcaatgcgccggtgtcactgtttccaaacgcaccctcaaccgcaacggcctccacttgccatcttactcaccttatccccaaatgatcattgtcgttcaaggtgcgtaatattagtaagaagtatttatcagcttaacgtgataacaataatagtaatatgaaatatttattaaattttttataattaatctctgctagaaaatttgattaatcatttttagtagaatttgttttttctcaactaggttttaaacaccaca

SEQ ID NO: 6037 - DNA, 652 bp, Artificial
  Mutations within GlyA3B4 introduced by GmGlyA3B4_T03TALE nuclease
gttcatgtacggttgcagatataaacgaagcatagcttatgtatgaggtgtaacaaaattggaaacaatagccatgcaaggtgaagaatgtcaccaactcagaaaccccttcttcattgacgtgtccctcactcactctcctctcttcactataaatcgccactcttcgtgttctccacttcaccaactccttcaaacttattaacactttccttagttcaatatggggaagcccttcttcactctctctctttcttccctttgcttgctactcttgtcgagtgcatgctttgctattacctccagcaagttcgtgccaactcaacaacctcaacgcgttggaacccgaccaccgcgttgagtccgaaggtggtcttattgaaacatggaactctcaacaccctgagctgcaatgcgccggtgtcactgtttccaaacgcaccctcaccgcaacggcctccacttgccatcttactcaccttatcccccaaatgatcattgtcgttcaaggtgcgtaatattagtaagaagtatttatcagcttaacgtgatacaatatagtaatatgaaatatttattaaatttttataattaatctctgctagaaaatttgattaatcatttttagtagaatttgtttttctcaactagg

SEQ ID NO: 6038 - DNA, 647 bp, Artificial; identical to SEQ ID NO: 5905
  Mutations within GlyA3B4 introduced by GmGlyA3B4_T03TALE nuclease

SEQ ID NO: 6039 - DNA, 665 bp, Artificial
  Mutations within GlyA3B4 introduced by GmGlyA3B4_T03TALE nuclease
gttcatgtacggttgcagatataaacgaagcatagcttatgtatgaggtgtaacaaaattggaaacaatagccatgcaaggtgaagaatgtcaccaactcagaaacccttcttcattgacgtgtccctcactcactctcctctcttcactataaatcgccactcttcgtgttctccacttcaccaactccttcaaacttattaacactttccttagttcaatatggggaagcccttcttcactctctctctttcttccctttgcttgctactcttgtcgagtgcatgctttgctattacctccagcaagtagtgccaactcaacaacctcaacgcgttggaacccgaccaccgcgttgagtccgaaggtggtcttattgaaacatggaactctcaacaccctgagctgcaatgcgccggtgtcactgtttccaaacgcaccctcaaccgcaacggcctccacttgccatcttactcaccttatccccaaatgatcattgtcgttcaaggtgcgtaatattagtaagaagtatttatcagcttaacgtgataacaataatagtaatatgaaatatttattaaatttttataattaatctctgctagaaaatttgattaatcattttagtagaatttgtttttctcaactaggtttttaaaacacca

SEQ ID NO: 6040 - DNA, 519 bp, Artificial
  Mutations within GlyA3B4 introduced by GmGlyA3B4_T03TALE nuclease
gttcatgtacggttgcagatataaacgaagcatagcttatgtatgaggtgtaacaaaattggaaacaatagccatgcaaggtgaagaatgtcaccaactcagaaacccttcttcattgacgtgtccctcactcactctcctctcttcactataaatcgccactcttcgtgttctccacttcaccaactccttcaaacttattaacactttccttagttcaatatggggaagcccttcttcactctctctctttcttccctttgcttgctactcttgtcgagtgcatgctttgctattacctccagcaagttcgcctccacttgccatcttactcaccttatccccaaatgatcattgtcgttcaaggtgcgtaatattagtaagaagtatttatcagcttaacgtgataacaataatagtaatatgaaatatttattaaattttttataattaatctctgctagaaaatttgattaatcatttttagtagaatttgtttttctcaactaggtttaaaca

SEQ ID NO: 6041 - DNA, 569 bp, Artificial
  Mutations within GlyA3B4 introduced by GmGlyA3B4_T03TALE nuclease
gttcatgtacggttgcagatataaacgaagcatagcttatgtatgaggtgtaacaaaattggaaacaatagccatgcaaggtgaagaatgtcaccaactcagaaacccttcttcattgacgtgtccctcactcactctcctctcttcactataaatcgccactcttcgtgttctccatttcaccaactccttcaaacttattaacactttccttagttcaatatggggaagcccttcttcactctctctctttcttccctttgcttgctactcttgtcgagtgcatgctttgctattacctccagcaagttctgccaactcaacaacctcaacgcgttggaacccgaccaccgcgttgagtccgaaggtggtcttattgaaacatggaactctcaacaccctgagctgcaatgcgccggtgtcactgtttccaaacgcaccctcaaccgcaacggcctccacttgccatcttactcaccttatcccccaaatgatcattgtcgttcaaggtgcgtaaatattagtaagaagtatttatcagcttaacgtgataacaataatagtaatat

SEQ ID NO: 6042 - DNA, 654 bp, Artificial
  Mutations within GlyA3B4 introduced by GmGlyA3B4_T03TALE nuclease
gttcatgtacggttgcagatataaacgaagcatagcttatgtatgaggtgtaacaaaattggaaacaatagccatgcaaggtgaagaatgtcaccaactcagaaaccccttcttcattgacgtgtccctcactcactctcctctcttcactataaatcgccactcttcgtgttctccacttcaccaactccttcaaacttattaacactttccttagttcaatatggggaagcccttcttcactctctctctttcttccctttgcttgctactcttgtcgagtgcatgctttgctattacctccagcaagttctgccaactcaacaacctcaacgcgttggaacccgaccaccgcgttgagtccgaaggtggtcttattgaaacatggaactctcaacaccctgagctgcaatgcgccggtgtcactgtttccaaacgcaccctcaaccgcaacggcctccacttgccatcttactcaccttatccccaaatgatcattgtcgttcaaggtgcgtaatattagtaagaagtatttatcagcttaacgtgataacaatatagtaatatgaaatatttattaaatttttataattaatctctgctagaaaatttgattaatcattttagtagaatttgttttctcaactaggtttt

SEQ ID NO: 6043 - DNA, 647 bp, Artificial
  Mutations within GlyA3B4 introduced by GmGlyA3B4_T03TALE nuclease
gttcatgtacggttgcagatataaacgaagcatagcttatgtatgaggtgtaacaaaattggaaacaatagccatgcaaggtgaagaatgtcaccaactcagaaacccttcttcattgacgtgtccctcactcactctcctctcttcactataaatcgccactcttcgtgttctccacttcaccaactccttcaaacttattaacactttccttagttcaatatggggaagcccttcttcactctctctctttcttccctttgcttgctactcttgtcgagtgcatgctttgctattacctccagcaagttcagtgccaactcaacaacctcaacgcgttggaacccgaccaccgcgttgagtccgaaggtggtcttattgaaacatggaactctcaacaccctgagctgcaatgcgccggtgtcactgtttccaaacgcaccctcaaccgcaacggcctccacttgccatcttactcaccttatccccaaatgatcattgtcgttcaaggtgcgtaatattagtaagaagtatttatcagcttaacgtgataacaataatagtaatatgaaatatttattaaatttttataattaatctctgctagaaaatttgattaatcattttagtagaatttgttttctcaa

SEQ ID NO: 6044 - DNA, 662 bp, Artificial; identical to SEQ ID NO: 5296
  Mutations within GlyA3B4 introduced by GmGlyA3B4_T03TALE nuclease

SEQ ID NO: 6045 - DNA, 537 bp, Artificial
  Mutations within GlyA3B4 introduced by GmGlyA3B4_T03TALE nuclease
gttcatgtacggttgcagatataaacgaagcatagcttatgtatgaggtgtaacaaaattggaaacaatagccatgcaaggtgaagaatgtcaccaactcagaaacccttcttcattgacgtgtccctcactcactctcctctcttcactataaatcgccactcttcgtgttctccacttcacctcactttcgatcgatgaccacccttcaacaacctcaacgcgttggaacccgaccaccgcgttgagtccgaaggtggtcttattgaaacatggaactctcaacaccctgagctgcaatgcgccggtgtcactgtttccaaacgcaccctcaaccgcaacggcctccacttgccatcttactcaccttatccccaaatgatcattgtcgttcaaggtgcgtaatattagtaagaagtatttatcagcttaacgtgataacaataatagtaatatgaaatatttattaaattttttataattaatctctgctagaaaattgattaatcatttttagtagaatttgtttttctcaac

SEQ ID NO: 6046 - DNA, 656 bp, Artificial; identical to SEQ ID NO: 5165
  Mutations within GlyA3B4 introduced by GmGlyA3B4_T03TALE nuclease

SEQ ID NO: 6047 - DNA, 665 bp, Artificial
  Mutations within GlyA3B4 introduced by GmGlyA3B4_T03TALE nuclease
gttcatgtacggttgcagatataaacgaagcatagcttatgtatgaggtgtaacaaaattggaaacaatagccatgcaaggtgaagaatgtcaccaactcagaaacccttcttcattgacgtgtccctcactcactctcctctcttcactataaatcgccactcttcgtgttctccacttcaccaactccttcaaacttattaacactttccttagttcaatatggggaagcccttcttcactctctctctttcttccctttgcttgctactcttgtcgagtgcatgctttgctattacctccagcaagttcgagtgccaactcaacaacctcaacgcgttggaacccgaccaccgcgttgagtccgaaggtggtcttattgaaacatggaactctcaacaccctgagctgcaatgcgccggtgtcactgtttccaaacgcaccctcaaccgcaacggcctccacttgccatcttactcaccttatccccaaatgatcattgtcgttcaaggtgcgtaatattagtaagagtatttatcagcttaacgtgataacaatatagtaatatgaaatatttattaaatttttataattaatctctgctagaaaatttgattaatcatttttagtagaatttgtttttctcaactaggttttaaacacca

SEQ ID NO: 6048 - DNA, 655 bp, Artificial
  Mutations within GlyA3B4 introduced by GmGlyA3B4_T03TALE nuclease
gttcatgtacggttgcagatataaacgaagcatagcttatgtatgaggtgtaacaaaattggaaacaatagccatgcaaggtgaagaatgtcaccaactcagaaacccttcttcattgacgtgtccctcactcactctcctctcttcactataaatcgccactcttcgtgttctccacttcaccaactccttcaaacttattaacactttccttagttcaatatggggaagcccttcttcactctctctctttcttccctttgcttgctactcttgtcgagtgcatgctttgctattacctccagcaagtgagtgccaactcaacaacctcaacgcgttggaacccgaccaccgcgttgagtccgaaggtggtcttattgaaacatggaactctcaacaccctgagctgcaatgcgccggtgtcactgtttccaaacgcaccctcaaccgcaacggcctccacttgccatcttactcaccttatccccaaatgatcattgtcgttcaaggtgcgtaatattagtaagaagtatttatcagcttaacgtgataacaataatagtaatatgaaatatttattaaatttttataattaatctctgctagaaaatttgattaatcattttagtagaatttgttttctcaactaggtttt

SEQ ID NO: 6049 - DNA, 536 bp, Artificial; identical to SEQ ID NO: 5447
  Mutations within GlyA3B4 introduced by GmGlyA3B4_T03TALE nuclease

SEQ ID NO: 6050 - DNA, 656 bp, Artificial
  Mutations within GlyA3B4 introduced by GmGlyA3B4_T03TALE nuclease
gttcatgtacggttgcagatataaacgaagcatagcctatgtatgaggtgtaacaaaattggaaacaatagccatgcaaggtgaagaatgtcaccaactcagaaacccttcttcattgacgtgtccctcactcactctcctctcttcactataaatcgccactcttcgtgttctccacttcaccaactccttcaaacttattaacactttccttagttcaatatggggaagcccttcttcactctctctctttcttccctttgcttgctactcttgtcgagtgcatgctttgctattacctccagcaagtagtgccaactcaacaacctcaacgcgttggaacccgaccaccgcgttgagtccgaaggtggtcttattgaaacatggaactctcaacaccctgagctgcaatgcgccggtgtcactgtttccaaacgcaccctcaaccgcaacggcctccacttgccatcttactcaccttatcccccaaatgatcattgtcgttcaaggtgcgtaatattagtaagaagtatttatcagcttaacgtgataacaataatagtaatatgaaatatttattaaatttttataattaatctctgctagaaaatttgattaatcattttagtagaatttgtttttctcaactaggtttt

SEQ ID NO: 6051 - DNA, 646 bp, Artificial; identical to SEQ ID NO: 4907
  Mutations within GlyA3B4 introduced by GmGlyA3B4_T03TALE nuclease

SEQ ID NO: 6052 - DNA, 661 bp, Artificial; identical to SEQ ID NO: 5502
  Mutations within GlyA3B4 introduced by GmGlyA3B4_T03TALE nuclease

SEQ ID NO: 6053 - DNA, 655 bp, Artificial
  Mutations within GlyA3B4 introduced by GmGlyA3B4_T03TALE nuclease
gttcatgtacggttgcagatataaacgaagcatagcttatgtatgaggtgtaacaaaaattggaaacaatagccatgcaaggtgaagaatgtcaccaactcagaaacccttcttcattgacgtgtccctcactcactctcctctcttcactataaatcgccactcttcgtgttctccacttcaccaactccttcaaacttattaacactttccttagttcaatatggggaagcccttcttcactctctctctttcttcccttgcttgctactcttgtcgagtgcatgctttgctattacctccagcaaggagtgccaactcaacaacctcaacgcgttggaacccgaccaccgcgttgagtccgaaggtggtcttattgaaactggaactctcaacaccctgagctgcaatgcgccaggtgtcactgtttccaaacgcaccctcaaccgcaacggcctccacttgccatcttactcaccttatccccaaatgatcattgtcgttcaaggtgcgtaatattagtaagaagtatttatcagcttaacgtgataacaataatagtaatatgaaatatttattaaatttttataattaatctctgctagaaaatttgattaatcattttagtagaatttgtttttctcaactaggtttt

SEQ ID NO: 6054 - DNA, 533 bp, Artificial; identical to SEQ ID NO: 4839
  Mutations within GlyA3B4 introduced by GmGlyA3B4_T03TALE nuclease

SEQ ID NO: 6055 - DNA, 580 bp, Artificial
  Mutations within GlyA3B4 introduced by GmGlyA3B4_T03TALE nuclease
gttcatgtacggttgcagatataaacgaagcatagcttatgtatgaggtgtaacaaaattggaaacaatagccatgcaaggtgaagaatgtcaccaactcagaaacccttcttcattgacgtgtccctcactcactctcctctcttcactataaatcgccactcttcgtgttctccacttcaccaactccttcaaacttattaacactttccttagttcaatatggggaagcccttcttcactctctctctttcttccctttgcttccaactcaacaacctcaacgcgttggaacccgaccaccgcgttgagtccgaaggtggtcttattgaaacatggaactctcaacaccctgagctgcaatgcgccggtgtcactgtttccaaacgcaccctcaaccgcaacggcctccacttgccatcttactcaccttatccccaaatgatcattgtcgttcaaggtgcgtaatattagtaagaagtatttatcagcttaacgtgatacaataatagtaatatgaatatttattaatttttataattaatctctgctagaaaatttgattaatcatttttagtag

SEQ ID NO: 6056 - DNA, 645 bp, Artificial; identical to SEQ ID NO: 4887
  Mutations within GlyA3B4 introduced by GmGlyA3B4_T03TALE nuclease

SEQ ID NO: 6057 - DNA, 660 bp, Artificial
  Mutations within GlyA3B4 introduced by GmGlyA3B4_T03TALE nuclease
gttcatgtacggttgcagatataaacgaagcatagcttatgtatgaggtgtaacaaaattggaaacaatagccatgcaaggtgaagaatgtcaccaactcagaaacccttcttcattgacgtgtccctcactcactctcctctcttcactataaatcgccactcttcgtgttctccacttcaccaactccttcaaacttattaacactttccttagttcaatatggggaagcccttcttcactctctctctttcttccctttgcttgctactcttgtcgagtgcatgctttgctattacctccagcaagttagtgccaactcaacaacctcaacgcgttggaacccgaccaccgcgttgagtccgaaggtggtcttattgaaacatggaactctcaacaccctgagctgcaatgcgccggtgtcactgtttccaaacgcaccctcaaccgcaacggcctccacttgccatcttactcaccttatccccaaatgatcattgtcgttcaaggtgcgtaatattagtaagaagtatttatcagcttaacgtgataacaataatagtaatatgaaatatttattaaatttttataattaatctctgctagaaaatttgattaatcattttagtagaatttgtttttctcaactaggttttaaaa

SEQ ID NO: 6058 - DNA, 651 bp, Artificial
  Mutations within GlyA3B4 introduced by GmGlyA3B4_T03TALE nuclease
  misc_feature (549): n is a or c or t or g
gttcatgtacggttgcagatataaacgaagcatagcttatgtatgaggtgtaacaaaattggaaacaatagccatgcaaggtgaagaatgtcaccaactcagaaacccttcttcattgacgtgtccctcactcactctcctctcttcactataaatcgccactcttcgtgttctccacttcaccaactccttcaaacttattaacactttccttagttcaatatggggaagcccttcttcactctctctctttcttccctttgcttgctactcttgtcgagtgcatgctttgctattacctccagcaagttcaacgcgttggaacccgaccaccgcgttgagtccgaaggtggtcttattgaaacatggaactctcaacaccctgagctgcaatgcgccggtgtcactgtttccaaacgcaccctcaaccgcaacggcctccacttgccatcttactcaccttatcccccaaatgatcattgtcgttcaaggtgcgtaatattagtaagaagtatttatcagcttaacgtgataacaataatagtaatntgaaatatttattaaattttttataattaatctctgctagaaaatttgattaatcatttttagtagaatttgttttttctcaactaggttttaaacaccaca

SEQ ID NO: 6059 - DNA, 647 bp, Artificial
  Mutations within GlyA3B4 introduced by GmGlyA3B4_T03TALE nuclease
gttcatgtacggttgcagatataaacgaagcatagcttatgtatgaggtgtaacaaaattggaaacaatagccatgcaaggtgaagaatgtcaccaactcagaaacccttcttcattgacgtgtccctcactcactctcctctcttcactataaatcgccactcttcgtgttctccacttcaccaactccttcaaacttattaacactttccttagttcaatatggggaagcccttcttcactctctctctttcttccctttgcttgctactcttgtcgagtgcatgctttgctattacctccagcaagttagtgccaactcaacaacctcaacgcgttggaacccgaccaccgcgttgagtccgaaggtggtcttattgaaacatggaactctcaacaccctgagctgcaatgcgccggtgtcactgtttccaaacgcaccctcaaccgcaacggcctccacttgccatcttactcaccttatcccccaaatgatcattgtcgttcaaggtgcgtaatattagtaagaagtatttatcagcttaacgtgataacaataatagtaatatgaaatatttattaaatttttataattaatctctgctagaaaatttgattaatcattttagtagaatttgttttctcaa

SEQ ID NO: 6060 - DNA, 664 bp, Artificial; identical to SEQ ID NO: 4996
  Mutations within GlyA3B4 introduced by GmGlyA3B4_T03TALE nuclease

SEQ ID NO: 6061 - DNA, 437 bp, Artificial
  Mutations within GlyA3B4 introduced by GmGlyA3B4_T03TALE nuclease
gttcatgtacggttgcagatataaacgaagcatagcttatgtatgaggtgtaacaaaattggaaacaatagccatgcaaggtgaagaatgtcaccaactcagaaacccttcttcattgacgtgtccctcactcactctcctctcttcactataaatcgccactcttcgtgttctccacttcaccaactccttcaaacttattaacactttccttagttcaatatggggaagcccttcttcactctctctctttcttccctttgcttgctactcttgtcgagtgcatgctttgctattacctccagcaagtaagcttaacgtgataacaataatagtaatatgaaatatttattaaattttttataattaatctctgctagaaaatttgattaatcatttttagtagaattttgtttttctcaactaggttttaaaca

SEQ ID NO: 6062 - DNA, 611 bp, Artificial
  Mutations within GlyA3B4 introduced by GmGlyA3B4_T03TALE nuclease
  misc_feature (541): n is a or c or t or g
gttcatgtacggttgcagatataaacgaagcatagcttatgtatgaggtgtaacaaaattggaaacaatagccatgcaaggtgaagaatgtcaccaactcagaaacccttcttcattgacgtgtccctcactcactctcctctcttcactataaatcgccactcttcgtgttctccacttcaccaactccttcaaacttattaacactttccttagttcaatatggggaagcccttcttcactctctctctttcttccctttgcttgctactcttgtcgagtgcatgctttgccactcacactcacgcgttgaacccgaccaccgcgttgagtccgaaggtggtcttattgaaacatggaactctcaacacccctgagctgcaatgcgccggtgtcactgttttccaaacgcaccctcaaccgcaacggcctccacttgccatcttactcaccttatcccccaaatgatcattgtcgttcaaggtgcgtaatattagtaagaagtatttatcagcttaacgtgataacaataatagtaatntgaaatatttattaaatttttttataattaatctctgctagaaaatttgattaatcattttttagtagaa

SEQ ID NO: 6063 - DNA, 664 bp, Artificial; identical to SEQ ID NO: 5662
  Mutations within GlyA3B4 introduced by GmGlyA3B4_T03TALE nuclease

SEQ ID NO: 6064 - DNA, 624 bp, Artificial; identical to SEQ ID NO: 5627
  Mutations within GlyA3B4 introduced by GmGlyA3B4_T03TALE nuclease

SEQ ID NO: 6065 - DNA, 619 bp, Artificial
  Mutations within GlyA3B4 introduced by GmGlyA3B4_T03TALE nuclease
gttcatgtacggttgcagatataaacgaagcatagcttatgtatgaggtgtaacaaaattggaaacaatagccatgcaaggtgaagaatgtcaccaactcagaaacccttcttcattgacgtgtccctcactcactctcctctcttcactataaatcgccactcttcgtgttctccacttcaccaactccttcaaacttattaacactttccttagttcaatatggggaagcccttcttcactctctctctttcttccctttgcttgctactcttgtcgagtgcatgctttgctattacctccagcaagtgcgtgccaactcaacaacctcaacgcgttggaacccgaccaccgcgttgagtccgaaggtggtcttattgaaacatggaactctcaacaccctgagctgcaatgcgccggtgtcactgtttccaaacgcaccctcaaccgcaacggcctccacttgccatcttactcaccttatccccaaatgatcattgtcgttcaaggtgcgtaatattagtaagaagtatttatcagcttaacgtgataacaataatagtaatatgaaatatttattaaatttttataattaatctctgctagaaaatttgattaa

SEQ ID NO: 6066 - DNA, 638 bp, Artificial
  Mutations within GlyA3B4 introduced by GmGlyA3B4_T03TALE nuclease
gttcatgtacggttgcagatataaacgaagcatagcttatgtatgaggtgtaacaaaattggaaacaatagccatgcaaggtgaagaatgtcaccaactcagaaacccttcttcattgacgtgtccctcactcactctcctctcttcactataaatcgccactcttcgtgttctccacttcaccaactccttcaaacttattaacactttccttagttcaatatggggaagcccttcttcactctctctctttcttccctttgcttgctactcttgtcgagtgcatgctttgctattacctccagcaagttcatgccaactcaacaacctcaacgcgttggaacccgaccaccgcgttgagtccgaaggtggtcttattgaaacatggaactctcaacaccctgagctgcaatgcgccggtgtcactgtttccaaaacgcaccctcaaccgcaacggcctccacttgccatcttactcaccttatccccaaatgatcattgtcgttcaaggtgcgtaatattagtaagaagtatttatcagcttaacgtgataacaataatagtaatatgaaatatttattaaatttttataattaatctctgctagaaaatttgattaatcattttagtagaatttg

SEQ ID NO: 6067 - DNA, 686 bp, Artificial
  Mutations within GlyA3B4 introduced by GmGlyA3B4_T03TALE nuclease
gttcatgtacggttgcagatataaacgaagcatagcttatgtatgaggtgtaacaaaattggaaacaatagccatgcaaggtgaagaatgtcaccaactcagaaacccttcttcattgacgtgtccctcactcactctcctctcttcactataaatcgccactcttcgtgttctccacttcaccaactccttcaaacttattaacactttccttagttcaatatggggaagcccttcttcactctctctctttcttccctttgcttgctactcttgtcgagtgcatgctttgctattacctccagcaagttcagacgatgtcacgctacaatcaaacctcaaacctcaagcgcgtttgggaaaccccgaccaccgcgttgagtccgaaggtggtcttattgaaacatggaactctcaacaccctgagctgcaatgcgccggtgtcactgtttccaaacgcaccctcaaccgcaacggcctccacttgccatcttactcaccttatccccaaatgatcattgtcgttcaaggtgcgtaatattagtaagaagtatttatcagcttaacgtgataacaataatagtaatatgaaatatttattaaatttttataattaatctctgctagaaaatttgattaatcattttagtagaatttgtttttctcaactaggttttaaaacacca

SEQ ID NO: 6068 - DNA, 659 bp, Artificial
  Mutations within GlyA3B4 introduced by GmGlyA3B4_T03TALE nuclease
gttcatgtacggttgcagatataaacgaagcatagcttatgtatgaggtgtaacaaaattggaaacaatagccatgcaaggtgaagaatgtcaccaactcagaaacccttcttcattgacgtgtccctcactcactctcctctcttcactataaatcgccactcttcgtgttctccacttcaccaactccttcaaacttattaacactttccttagttcaatatggggaagcccttcttcactctctctctttcttccctttgcttgctactcttgtcgagtgcatgctttgctattacctccagcaatgccaactcaacaacctcaacgcgttggaacccgaccaccgcgttgagtccgaaggtggtcttattgaaacatggaactctcaacaccctgagctgcaatgcgccggtgtcactgtttccaaacgcaccctcaaccgcaacggcctccacttgccatcttactcaccttatccccaaatgatcattgtcgttcaaggtgcgtaatattagtaagaagtatttatcagcttaacgtgataacaatatagtaatatgaaatatttattaaatttttataattaatctctgctagaaaatttgattaatcattttagtagaatttgttttctcaactaggtttttaaaacacca

SEQ ID NO: 6069 - DNA, 658 bp, Artificial
  Mutations within GlyA3B4 introduced by GmGlyA3B4_T03TALE nuclease
gttcatgtacggttgcagatataaacgaagcatagcttatgtatgaggtgtaacaaaattggaaacaatagccatgcaaggtgaagaatgtcaccaactcagaaacccttcttcattgacgtgtccctcactcactctcctctcttcactataaatcgccactcttcgtgttctccacttcaccaactccttcaaacttattaacactttccttagttcaatatggggaagcccttcttcactctctctctttcttccctttgcttgctactcttgtcgagtgcatgctttgctattacctccagcaagttcaactcaacaacctcaacgcgttggaacccgaccaccgcgttgagtccgaaggtggtcttattgaaacatggaactctcaacaccctgagctgcaatgcgccggtgtcactgtttccaaacgcaccctcaaccgcaacggcctccacttgccatcttactcaccttatccccaaatgatcattgtcgttcaaggtgcgtaatattagtaagaagtatttatcagcttaacgtgataacaataatagtaatatgaaatatttattaaatttttataattaatctctgctagaaaatttgattaatcatttttagtagaatttgtttttctcaatctaggttttaaaca

SEQ ID NO: 6070 - DNA, 668 bp, Artificial
  Mutations within GlyA3B4 introduced by GmGlyA3B4_T03TALE nuclease
gttcatgtacggttgcagatataaacgaagcatagcttatgtatgaggtgtaacaaaattggaaacaatagccatgcaaggtgaagaatgtcaccaactcagaaacccttcttcattgacgtgtccctcactcactctcctctcttcactataaatcgccactcttcgtgttctccacttcaccaactccttcaaacttattaacactttccttagttcaatatggggaagcccttcttcactctctctctttcttccctttgcttgctactcttgtcgagtgcatgctttgctattacctccagcaagttcaaagtgccaactcaacaacctcaacgcgttggaacccgaccaccgcgttgagtccgaaggtggtcttattgaaacatggaactctcaacaccctgagctgcaatgcgccggtgtcactgtttccaaacgcaccctcaaccgcaacggcctccacttgccatcttactcaccttatccccaaatgatcattgtcgttcaaggtgcgtaatattagtaagaagtatttatcagcttaacgtgataacaataatagtaatatgaaatatttattaaatttttataattaatctctgctagaaaatttgattaatcattttagtagaatttgtttttctcaactaggttttaaaacacca

SEQ ID NO: 6071 - DNA, 431 bp, Artificial
  Mutations within GlyA3B4 introduced by GmGlyA3B4_T03TALE nuclease
gttcatgtacggttgcagatataaacgaagcatagcttatgtatgaggtgtaacaaaattggaaacaatagccatgcaaggtgaagaatgtcaccaactcagaaacccttcttcattgacgtgtccctcactcactctcctctcttcactataaatcgccactcttcgtgttctccacttcaccaactccttcaaacttattaacactttccttagttcaatatggggaagcccttcttcactctctctctttcttccctttgcttgctactcttgagtccgaaggtggtcttattgaaacatggaactctcaacaccctgagctgcaatgcgccggtgtcactgtttccaaacgcaccctcaaccgcacggcctccacttgccatcttactcaccttatccccaaatgatcattgtcgttcaaggtgcgt

SEQ ID NO: 6072 - DNA, 643 bp, Artificial
  Mutations within GlyA3B4 introduced by GmGlyA3B4_T03TALE nuclease
gttcatgtacggttgcagatataaacgaagcatagcttatgtatgaggtgtaacaaaaattggaaacaatagccatgcaaggtgaagaatgtcaccaactcagaaacccttcttcattgacgtgtccctcactcactctcctctcttcactataaatcgccactcttcgtgttctccacttcaccaactccttcaaacttattaacactttccttagttcaatatggggaagcccttcttcactctctctctttcttccctttgcttgctactcttgtcgagtgcatgctttgctattacctccagcaagtgccaactcaacaacctcaacgcgttggaacccgaccaccgcgttgagtccgaaggtggtcttattgaaacatggaactctcaacaccctgagctgcaatgcgccggtgtcactgtttccaaacgcaccctcaaccgcaacggcctccacttgccatcttactcaccttatccccaaatgatcattgtcgttcaaggtgcgtaatattagtaagaagtatttatcagcttaacgtgataacaatatagtaatatgaaatatttattaaatttttataattaatctctgctagaaaatttgattaatcattttagtagaatttgttttctcaac

SEQ ID NO: 6073 - DNA, 656 bp, Artificial
  Mutations within GlyA3B4 introduced by GmGlyA3B4_T03TALE nuclease
  misc_feature (314): n is a or c or t or g
gttcatgtacggttgcagatataaacgaagcatagcttatgtatgaggtgtaacaaaattggaaacaatagccatgcaaggtgaagaatgtcaccaactcagaaacccttcttcattgacgtgtccctcactcactctcctctcttcactataaatcgccactcttcgtgttctccacttcaccaactccttcaaacttattaacactttccttagttcaatatggggaagcccttcttcactctctctctttcttccctttgcttgctactcttgtcgagtgcatgctttgctattacctccagcaagttcangccaactcaacaacctcaacgcgttggaacccgaccaccgcgttgagtccgaaggtggtcttattgaaacatggaactctcaacaccctgagctgcaatgcgccggtgtcactgtttccaaacgcaccctcaaccgcaacggcctccacttgccatcttactcaccttatccccaaatgatcattgtcgttcaaggtgcgtaatattagtaagagtatttatcagcttaacgtgataacaataatagtaatatgaaatatttattaaatttttataattaatctctgctagaaaatttgattaatcattttagtagaatttgtttttctcaactaggttttt

SEQ ID NO: 6074 - DNA, 562 bp, Artificial
  Mutations within GlyA3B4 introduced by GmGlyA3B4_T03TALE nuclease
gttcatgtacggttgcagatataaacgaagcatagcttatgtatgaggtgtaacaaaattggaaacaatagccatgcaaggtgaagaatgtcaccaactcagaaacccttcttcattgacgtgtccctcactcactctcctctcttcactataaatcgccactcttcgtgttctccacttcaccaactccttcaaacttattaacactttccttagttcaatatggggaagcccttcttcactctctctctttcttccctttgcttgctactcttgtcgagtgcatgctttgctattacctccagcaagttcaacgcgttggaacccgaccaccgcgttgagtccgaaggtggtcttattgaaacatggaactctcaacaccctgagctgcaatgcgccggtgtcactgtttccaacgcaccctcaaccgcaacggtcctccaccttgccatcttactcaccttactccccaaatgatcattgtccgttcaaggtgcgtaatattagtaagaagtatttatcagctttaacgtgataacaataatagtaatatgaaatattt

SEQ ID NO: 6075 - DNA, 634 bp, Artificial
  Mutations within GlyA3B4 introduced by GmGlyA3B4_T03TALE nuclease
gttcatgtacggttgcagatataaacgaagcatagcttatgtatgaggtgtaacaaaattggaaacaatagccatgcaaggtgaagaatgtcaccaactcagaaacccttcttcattgacgtgtccctcactcactctcctctcttcactataaatcgccactcttcgtgttctccacttcaccaactccttcaaacttattaacactttccttagttcaatatggggaagcccttcttcactctctctctttcttccctttgcttgctactcttgtcgagtgcatgctttgctattacctccagcaagagtgccaactcaacaacctcaacgcgttggaacccgaccaccgcgttgagtccgaaggtggtcttattgaacatggaactctcaacaccctgagctgcaatgcgccggtgtcactgtttccaaacgcaccctcaaccgcaacggcctccacttgccatcttactcaccttatccccaaatgatcattgtcgttcaaggtgcgtaatattagtaagaagtatttatcagcttaacgtgataacaataatagtaatatgaaatatttattaaatttttataattaatctctgctagaaaatttgattaatcattttagtagaatttg

SEQ ID NO: 6076 - DNA, 662 bp, Artificial
  Mutations within GlyA3B4 introduced by GmGlyA3B4_T03TALE nuclease
gttcatgtacggttgcagatataaacgaagcatagcttatgtatgaggtgtaacaaaattggaaacaatagccatgcaaggtgaagaatgtcaccaactcagaaacccttcttcattgacgtgtccctcactcactctcctctcttcactataaatcgccactcttcgtgttctccacttcaccaactccttcaaacttattaacactttccttagttcaatatggggaagcccttcttcactctctctctttcttccctttgcttgctactcttgtcgagtgcatgctttgctattacctccagcaagttgtgccaactcaacaacctcaacgcgttggaacccgaccaccgcgttgagtccgaaggtggtcttattgaaacatggaactctcaacaccctgagctgcaatgcgccggtgtcactgtttccaaacgcaccctcaaccgcaacggcctccacttgccatcttactcaccttatccccaaatgatcattgtcgttcaaggtgcgtaatattagtaagaagtatttatcagcttaacgtgataacaataatagtaatatgaaatatttattaaatttttataattaatctctgctagaaaatttgattaatcattttagtagaatttgttttctcaactaggttttaaaacacc

SEQ ID NO: 6077 - DNA, 589 bp, Artificial
  Mutations within GlyA3B4 introduced by GmGlyA3B4_T03TALE nuclease
gttcatgtacggttgcagatataaacgaagcatagcttatgtatgaggtgtaacaaaattggaaacaatagccatgcaaggtgaagaatgtcaccaactcagaaacccttcttcattgacgtgtccctcactcactctcctctcttcactataaatcgccactcttcgtgttctccacttcaccaactccttcaaacttattaacactttccttagttcaatatggggaagcccttcttcactctctctctttcttccctttgcttgctactcttgtcgagtgccaactcaacaacctcaacgcgttggaacccgaccaccgcgttgagtccgaaggtggtcttattgaaacatggaactctcaacaccctgagctgcaatgcgccggtgtcactgtttccaaacgcaccctcaaccgcaacggcctccacttgccatcttactcaccttatccccaaatgatcattgtcgttcaaggtgcgtaatattagtaagaagtatttatcagcttaacgtgataacaataatagtaatatgaaatatttattaattttttataattaatctctgctagaaaatttgattaatc

SEQ ID NO: 6078 - DNA, 636 bp, Artificial
  Mutations within GlyA3B4 introduced by GmGlyA3B4_T03TALE nuclease
gttcatgtacggttgcagatataaacgaagcatagcttatgtatgaggtgtaacaaaattggaaacaatagccatgcaaggtgaagaatgtcaccaactcagaaacccttcttcattgacgtgtccctcactcactctcctctcttcactataaatcgccactcttcgtgttctccacttcaccaactccttcaaacttattaacactttccttagttcaatatggggaagcccttcttcactctctctctttcttccctttgcttgctactcttgtcgagtgcatgctttgctattacctccagcaagtgtgccaactcaacaacctcaacgcgttggaacccgaccaccgcgttgagtccgaaggtggtcttattgaaacatggaactctcaacaccctgagctgcaatgcgccggtgtcactgtttccaaacgcaccctcaaccgcaacggcctccacttgccatcttactcaccttatccccaaatgatcattgtcgttcaaggtgcgtaatattagtaagaagtatttatcgcagtatacgtgataacaataatagtaatatgaaatatttattaaatttttataattaatctctgctagaaaatttgattaatcattttagtagaatttg

SEQ ID NO: 6079 - DNA, 644 bp, Artificial
  Mutations within GlyA3B4 introduced by GmGlyA3B4_T03TALE nuclease
gttcatgtacggttgcagatataaacgaagcatagcttatgtatgaggtgtaacaaaattggaaacaatagccatgcaaggtgaagaatgtcaccaactcagaaacccttcttcattgacgtgtccctcactcactctcctctcttcactataaatcgccactcttcgtgttctccacttcaccaactccttcaaacttattaacactttccttagttcaatatggggaagcccttcttcactctctctctttcttccctttgcttgctactcttgtcgagtgcatgctttgctattacctccagcaagttcgccaactcaacaacctcaacgcgttggaacccgaccaccgcgttgagtccgaaggtggtcttattgaaacatggaactctcaacaccctgagctgcaatgcgccggtgtcactgtttccaaacgcaccctcaaccgcaacggcctccacttgccatcttactcaccttatccccaaatgatcattgtcgttcaaggtgcgtaatattagtaagaagtatttatcagcttaacgtgataacaataatagtaatatgaaatatttattaaatttttataattaatctctgctagaaaatttgattaatcattttagtagaatttgttttctcaa

SEQ ID NO: 6080 - DNA, 646 bp, Artificial
  Mutations within GlyA3B4 introduced by GmGlyA3B4_T03TALE nuclease
gttcatgtacggttgcagatataaacgaagcatagcttatgtatgaggtgtaacaaaattggaaacaatagccatgcaaggtgaagaatgtcaccaactcagaaacccttcttcattgacgtgtccctcactcactctcctctcttgcactataaatcgccactcttcgtgttctccacttcaccaactccttcaaacttattaacactttccttagttcaatatggggaagcccttcttcactctctctctttcttccctttgcttgctactcttgtcgagtgcatgctttgctattacctccagcaagtagtgccaactcaacaacctcaacgcgttggaacccgaccaccgcgttgagtccgaaggtggtcttattgaaacatggaactctcaacaccctgagctgcaatgcgccggtgtcactgtttccaaacgcaccctcaaccgcaacggcctccacttgccatcttactcaccttatccccaaatgatcattgtcgttcaaggtgcgtaatattagtaagaagtatttatcagcttaacgtgataacaataatagtaatatgaaatatttattaaatttttataattaatctctgctagaaaatttgattaatcattttagtagaatttgttttctcaa

SEQ ID NO: 6081 - DNA, 623 bp, Artificial
  Mutations within GlyA3B4 introduced by GmGlyA3B4_T03TALE nuclease
gttcatgtacggttgcagatataaacgaagcatagcttatgtatgaggtgtaacaaaattggaaacaatagccatgcaaggtgaagaatgtcaccaactcagaaacccttcttcattgacgtgtccctcactcactctcctctcttcactataaatcgccactcttcgtgttctccacttcaccaactccttcaaacttattaacactttccttagttcaatatggggaagcccttcttcactctctctctttcttccctttgcttgctactcttgtcgagtgcatgctttgctattacctccagcaagttagtgccaactcaacaacctcaacgcgttggaacccgaccaccgcgttgagtccgaaggtggtcttattgaaacatggaactctcaacaccctgagctgcaatgcagccggtgtcactgtttccaaacgcaccctcaaccgcaacggcctccacttgccatcttactcaccttatccccaaatgatcattgtcgttcaaggtgcgtaatattagtaagaagtatttatcagcttaacgtgataacaataatagtaatatgaaatatttattaaatttttataattaatctctgctagaaaatttgattaatca

SEQ ID NO: 6082 - DNA, 660 bp, Artificial
  Mutations within GlyA3B4 introduced by GmGlyA3B4_T03TALE nuclease
gttcatgtacggttgcagatataaacgaagcatagcttatgtatgaggtgtaacaaaattggaaacaatagccatgcaaggtgaagaatgtcaccaactcagaaaccccttcttcattgacgtgtccctcactcactctcctctcttcactataaatcgccactcttcgtgttctccacttcaccaactccttcaaacttattaacactttccttagttcaatatggggaagcccttcttcactctctctctttcttccctttgcttgctactcttgtcgagtgcatgctttgctattacctccagcaagtgccaactcaacaacctcaacgcgttggaacccgaccaccgcgttgagtccgaaggtggtcttattgaaacatggaactctcaacaccctgagctgcaatgcgccggtgtcactgtttccaaacgcaccctcaaccgcaacggcctccacttgccatcttactcaccttatccccaaatgatcattgtcgttcaaggtgcgtaatattagtaagaagtatttatcagcttaacgtgataacaataatagtaatatgaaatatttattaaatttttataattaatctctgctagaaaatttgattaatcattttagtagaatttgttttctcaactaggttttaaaacacc

SEQ ID NO: 6083 - DNA, 395 bp, Artificial
  Mutations within GlyA3B4 introduced by GmGlyA3B4_T03TALE nuclease
gttcatgtacggttgcagatataaacgaagcatagcttatgtatgaggtgtaacaaaaattggaaacaatagccatgcaaggtgaagaatgtcaccaactcagaaacccttcttctattgacgtgtccctcactcactctcctctcttcactataaatcgccactcttcgtgttctcctacttcaccaaactccttcaaacttattaacactttccttagttcaatatggggaagccttcttcactctctctctttcttcccttgcttgctactcttgtcgagtgcatgctttgctattacctccagcaagactcaacaacctcaacgcgttggaaccgaccaccgcgttgagtccgaaggtggtcttattgaaacatggaactctcaacacctc

SEQ ID NO: 6084 - DNA, 543 bp, Artificial; identical to SEQ ID NO: 5021
  Mutations within GlyA3B4 introduced by GmGlyA3B4_T03TALE nuclease

SEQ ID NO: 6085 - DNA, 442 bp, Artificial
  Mutations within GlyA3B4 introduced by GmGlyA3B4_T03TALE nuclease
gttcatgtacggttgcagatataaacgaagcatagcttatgtatgaggtgtaacaaaattggaaacaatagccatgcaaggtgaagaatgtcaccaactcagaaacccttcttcattgacgtgtccctcactcactctcctctcttcactataaatcgccactcttcgtgttctccacttcaccaactccttcaaacttattaacactttccttagttcaatatggggaagcccttcttcactctctctctttcttccctttgcttgctactcttgtcgagtgcatgctttgctattacctccagcaagttcatctcataaataacgtcatgcattacatgttaattattacatgcttaacgtattcaacacgagtgccaactcaacaacctcaacgcgttggaacccgaccaccgcgttgagtccgaaggtggtcttattg

SEQ ID NO: 6086 - DNA, 621 bp, Artificial
  Mutations within GlyA3B4 introduced by GmGlyA3B4_T03TALE nuclease
gttcatgtacggttgcagatataaacgaagcatagcttatgtatgaggtgtaacaaaattggaaacaatagccatgcaaggtgaagaatgtcaccaactcagaaacccttcttcattgacgtgtccctcactcactctcctctcttcactataaatcgccactcttcgtgttctccacttcaccaactccttcaaacttattaacactttccttagttcaatatggggaagcccttcttcactctctctctttcttccctttgcttgctactcttgtcgagtgcatgctttgctattacctccagcaagtttgccaactcaacaacctcaacgcgttggaacccgaccaccgcgttgagtccgaaggtggtcttattgaaacatggaactctcaacaccctgagctgcaatgcgccggtgtcactgtttccaaacgcaccctcaaccgcaacggcctccacttgccatcttactcaccttatcccccaaatgatcattgtcgttcaaggtgcgtaatattagtaagaagtatttatcagcttaacgtgataacaataatagtaatatgaaatatttattaaatttttataattaatctctgctagaaaatttgattaatca

SEQ ID NO: 6087 - DNA, 617 bp, Artificial
  Mutations within GlyA3B4 introduced by GmGlyA3B4_T03TALE nuclease
gttcatgtacggttgcagatataaacgaagcatagcttatgtatgaggtgtaacaaaattggaaacaatagccatgcaaggtgaagaatgtcaccaactcagaaacccttcttcattgacgtgtccctcactcactctcctctcttcactataaatcgccactcttcgtgttctccacttcaccaactccttcaaacttattaacactttccttagttcaatatggggaagcccttcttcactctctctctttcttccctttgcttgctactcttgtcgagtgcatgctttgctattacctccagcaagttcaaactcaacaacctcaacgcgttggaacccgaccaccgcgttgagtccgaaggtggtcttattgaaacatggaactctcaacaccctgagctgcaatgcgccggtgtcactgtttccaaacgcaccctcaaccgcaacggcctccacttgccatcttactcaccttatccccaatgatcattgtcgttcaaggtgcgtaatattagtaagaagtatttatcagcttaacgtgataacaataatagtaatatgaaatatttattaaatttttataattaatctctgctagaaaatttgattaatca

SEQ ID NO: 6088 - DNA, 662 bp, Artificial
  Mutations within GlyA3B4 introduced by GmGlyA3B4_T03TALE nuclease
  misc_feature (528): n is a or c or t or g
gttcatgtacggttgcagatataaacgaagcatagcttatgtatgaggtgtaacaaaattggaaacaatagccatgcaaggtgaagaatgtcaccaactcagaaacccttcttcattgacgtgtccctcactcactctcctctcttcactataaatcgccactcttcgtgttctccacttcaccaactccttcaaacttattaacactttccttagttcaatatggggaagcccttcttcactctctctctttcttccctttgcttgctactcttgtcgagtgcatgctttgctattacctccagcaagtacgccaactcaacaacctcaacgcgttggaacccgaccaccgcgttgagtccgaaggtggtcttattgaaacatggaactctcaacaccctgagctgcaatgcgccggtgtcactgtttccaaacgcaccctcaaccgcaacggcctccacttgccatcttactcaccttatccccaaatgatcattgtcgttcaaggtgcgtaatattagtaagagnatttatcagcttaacgtgatacaatatagtaatatgaaatatttattaaatttttataattaatctctgctagaaaatttgattaatcattttagtagaatttgttttctcaactaggtttttaaacaccagca

SEQ ID NO: 6089 - DNA, 647 bp, Artificial
  Mutations within GlyA3B4 introduced by GmGlyA3B4_T03TALE nuclease
gttcatgtacggttgcagatataaacgaagcatagcttatgtatgaggtgtaacaaaattggaaacaatagccatgcaaggtgaagaatgtcaccaactcagaaacccttcttcattgacgtgtccctcactcactctcctctcttcactataaatcgccactcttcgtgttctccacttcaccaactccttcaaacttattaacactttccttagttcaatatggggaagcccttcttcactctctctctttcttccctttgcttgctactcttgtcgagtgcatgctttgctattacctccagcaagccaactcaacaacctcaacgcgttggaacccgaccaccgcgttgagtccgaaggtggtcttattgaaacatggaactctcaacaccctgagctgcaatgcgccggtgtcactgtttccaaacgcaccctcaaccgcaacggcctccacttgccatcttactcaccttatccccaaatgatcattgtcgttcaaggtgcgtaatattagtaagaagtatttatcagcttaacgtgataacaataatagtaatatgaaatatttattaaatttttataattaatctctgctagaaaatttgattaatcatttttagtagaatttgtttttctcaactagg

SEQ ID NO: 6090 - DNA, 660 bp, Artificial
  Mutations within GlyA3B4 introduced by GmGlyA3B4_T03TALE nuclease
  misc_feature (533): n is a or c or t or g
gttcatgtacggttgcagatataaacgaagcatagcttatgtatgaggtgtaacaaaattggaaacaatagccatgcaaggtgaagaatgtcaccaactcagaaacccttcttcattgacgtgtccctcactcactctcctctcttcactataaatcgccactcttcgtgttctccacttcaccaactccttcaaacttattaacactttccttagttcaatatggggaagcccttcttcactctctctctttcttccctttgcttgctactcttgtcgagtgcatgctttgctattacctccagcaagttcgagtgccaactcaacaacctcaacgcgttggaacccgaccaccgcgttgagtccgaaggtggtcttattgaaacatggaactctcaacaccctgagctgcaatgcgccggtgtcactgtttccaaacgcaccctcaaccgcaacggcctccacttgccatcttactcaccttatcccccaaatgatcattgtcgttcaaggtgcgtaatattagtaagagnatttatcagcttaacgtgataacaatatagtaatatgaaatatttattaaatttttataattaatctctgctagaaaatttgattaatcattttagtagaatttgttttctcaactaggtttttaaa

SEQ ID NO: 6091 - DNA, 545 bp, Artificial; identical to SEQ ID NO: 5377
  Mutations within GlyA3B4 introduced by GmGlyA3B4_T03TALE nuclease

SEQ ID NO: 6092 - DNA, 623 bp, Artificial
  Mutations within GlyA3B4 introduced by GmGlyA3B4_T03TALE nuclease
gttcatgtacggttgcagatataaacgaagcatagcttatgtatgaggtgtaacaaaaattggaaacaatagccatgcaaggtgaagaatgtcaccaactcagaaacccttcttcattgacgtgtccctcactcactctcctctcttcactataaatcgccactcttcgtgttctccacttcaccaactccttcaaacttattaacactttccttagttcaatatggggaagcccttcttcactctctctctttcttccctttgcttgctactcttgtcgagtgcatgctttgctattacctccagcaagttagtgccaactcaacaacctcaacgcgttggaacccgaccaccgcgttgagtccgaaggtggtcttattgaaacatggaactctcaacaccctgagctgcaatgcgccggtgtcactgtttccaaacgcaccctcaaccgcaacggcctccacttgccatcttactcaccttatccccaaatgatcattgtcgttcaaggtgcgtaatattagtaagaagtatttatcagcttaacgtgataacaataatagtaatatgaaatatttattaaatttttataattaatctctgctagaaaatttgattaatca

SEQ ID NO: 6093 - DNA, 616 bp, Artificial
  Mutations within GlyA3B4 introduced by GmGlyA3B4_T03TALE nuclease
  misc_feature (549): n is a or c or t or g
gttcatgtacggttgcagatataaacgaagcatagcttatgtatgaggtgtaacaaaattggaaacaatagccatgcaaggtgaagaatgtcaccaactcagaaacccttcttcattgacgtgtccctcactcactctcctctcttcactataaatcgccactcttcgtgttctccacttcaccaactccttcaaacttattaacactttccttagttcaatatggggaagcccttcttcactctctctctttcttccctttgcttgctactcttgtcgagtgcatgctttgcgagtgccaactcacaacctcaacgcgttggaacccgaccaccgcgttgagtccgaaggtggtcttattgaaacatggaactctcaacaccctgagctgcaatgcgccggtgtcactgtttccaaacgcaccctcaaccgcaacggcctccacttgccatcttactcaccttatccccaaatgatcattgtcgttcaaggtgcgtaatattagtaagaagtatttatcagcttaacgtgataacaataatagtaatntgaaatatttattaaattttttataattaatctctgctagaaaatttgattaatctttttagtagaa

SEQ ID NO: 6094 - DNA, 656 bp, Artificial
  Mutations within GlyA3B4 introduced by GmGlyA3B4_T03TALE nuclease
gttcatgtacggttgcagatataaacgaagcatagcttatgtaatgaggtgtaacaaaattggaaacaatagccatgcaaggtgaagaatgtcaccaatctcagaaacccttcttcattgacgtgtccctcactcactctcctctcttcactataaatcgccactcttcgtggttctccacttcaccaactccttcaaacttattaacactttccttagttcaatatggggaagcccttcttcactctctgctctttcttccctttgcttgctactcttgtcgagtgcatgctttgctattacctccagcaagttcaatcaacgcgttggaacccgaccaccgcgttgagtccgaaggtggtcttattgaacatggaactctcaacacctgagctgcaatgcgccggtgtcactgtttccaaacgcacctcaaccgcaacggcctccacttgccatcttactcaccttatccccaaatgatcattgtcgttcaaggtgcgtaatattagtaagaagtatttatcagcttaacgtgataacaataatagtaatatgaaatatttattaaattttttataattaatctctgctagaaaatttgattaatcatttttagtagaatttgttttttctcaactaggttttaaaacaccaca

SEQ ID NO: 6095 - DNA, 664 bp, Artificial
  Mutations within GlyA3B4 introduced by GmGlyA3B4_T03TALE nuclease
gttcatgtacggttgcagatataaacgaagcatagcttatgtaatgaggtgtaacaaaattggaaacaatagccatgcaaaggtgaagaatgtcaccaactcagaaacccttcttcattgacgtgtccctcactcactctcctctcttcactataaatcgccactcttcgtgttctccacttcaccaactccttcaaacttattaacactttccttagttcaatatggggaagcccttcttgcactctctctctttcttccctttgcttgctactcttgtcgagtgcatgctttgctattacctccagcaagcaagggaagaagagtggaacccgaccaccgcgttgagtccgaaggtggtcttattgaaacatggaactctcaataccctgagctgcaatgcgccggtgtcactgtttccaaacgcaccctcaaccgcaacggcctccacttgccatcttactcaccttatcccccaaatgatcattgtcgttcaaggtgcgtaatattagtaagaagtatttatcagctttaacgtgataacaataatagtaatatgaaatattttattaaatttttttataaattaatctctgctagaaaatttgattaatcatttttagtagaatttgtttttttctcaactaggttttaaaacaccaca

SEQ ID NO: 6096 - DNA, 412 bp, Artificial
  Mutations within GlyA3B4 introduced by GmGlyA3B4_T03TALE nuclease
gttcatgtacggttgcagatataaacgaagcatagcttatgtatgaggtgtaacaaaattggaaacaatagccatgcaaggtgaagaatgtcaccaactcaacaacctcaacgcgttggaacccgaccaccgcgttgagtccgaaggtggtcttattgaaacatggaactctcaacaccctgagctgcaatgcgccggtgtcactgtttccaaacgcaccctcaaccgcaacggcctccacttgccatcttactcaccttatcccaaatgatcattgtcgttcaaggtgcgtaatattagtaagaagtatttatcagcttaacgtgataacaataatagtaatatgaaatatttattaaattttttataattaatctctgctagaaaatttgattaatcatttttagtagaa

SEQ ID NO: 6097 - DNA, 659 bp, Artificial
  Mutations within GlyA3B4 introduced by GmGlyA3B4_T03TALE nuclease
gttcatgtacggttgcagatataaacgaagcatagcttatgtatgaggtgtaacaaaattggaaacaatagccatgcaaggtgaagaatgtcaccaactcagaaacccttcttcattgacgtgtccctcactcactctcctctcttcactataaatcgccactcttcgtgttctccacttcaccaactccttcaaacttattaacactttccttagttcaatatggggaagcccttcttcactctctctctttcttccctttgcttgctactcttgtcgagtgcatgctttgctattacctccagcaagtgccaactcaacaacctcaacgcgttggaacccgaccaccgcgttgagtccgaaggtggtcttattgaacatggactctcaacacctgagctgcaatgcgccggtgtcactgtttccaaacgcaccctcaaccgcaacggcctccacttgccatcttactcaccttatccccaaatgatcattgtcgttcaaggtgcgtaatattagtaagaagtatttatcagcttaacgtgataacaataatagtaatatgaaatatttattaaatttttataattaatctctgctagaaaatttgattaatcattttagtagaatttgtttttctcaactaggtttttaaaacacca

SEQ ID NO: 6098 - DNA, 644 bp, Artificial
  Mutations within GlyA3B4 introduced by GmGlyA3B4_T03TALE nuclease
gttcatgtacggttgcagatataaacgaagcatagcttatgtatgaggtgtaacaaaattggaaacaatagccatgcaaggtgaagaatgtcaccaactcagaaacccttcttcattgacgtgtccctcactcactctcctctcttcactataaatcgccactcttcgtgttctccacttcaccaactccttcaaacttattaacactttccttagttcaatatggggaagcccttcttcactctctctctttcttccctttgcttgctactcttgtcgagtgcatgctttgctattacctccagcaagtgccaactcaacaacctcaacgcgttggaacccgaccaccgcgttgagtccgaaggtggtcttattgaaacatggaactctcaacgccctgagctgcaatgcgccggtgtcactgtttccaaacgcaccctcaaccgcaacggcctccacttgccatcttactcaccttatccccaaatgatcattgtcgttcaaggtgcgtaatattagtaagaagtatttatcagcttaacgtgataacaatatagtaatatgaaatatttattaaatttttataatttaatctctgctagaaaatttgattaatcatttttagtagaatttgtttttctcaa

SEQ ID NO: 6099 - DNA, 641 bp, Artificial
  Mutations within GlyA3B4 introduced by GmGlyA3B4_T03TALE nuclease
gttcatgtacggttgcagatataaacgaagcatagcttatgtatgaggtgtaacaaaattggaaacaatagccatgcaaggtgaagaatgtcaccaactcagaaacccttcttcattgacgtgtccctcactcactctcctctcttcactataaatcgccactcttcgtgttctccacttcaccaactccttcaaacttattaacactttccttagttcaatatggggaagcccttcttcactctctctctttcttccctttgcttgctactcttgtcgagtgcatgctttgctattacctccagagtgccaactcaacaacctcaacgcgttggaacccgaccaccgcgttgagtccgaaggtggtcttattgaaacatggaactctcaacaccctgagctgcaatgcgccggtgtcactgtttccaaacgcaccctcaaccgcaacggcctccacttgccatcttactcaccttatccccaaatgatcattgtcgttcaaggtgcgtaatattagtaagaagtatttatcagcttaacgtgataacaataatagtaatatgaaatatttattaaatttttataattaatctctgctagaaaatttgattaatcattttagtagaatttgtttttctcaa

SEQ ID NO: 6100 - DNA, 644 bp, Artificial; identical to SEQ ID NO: 5792
  Mutations within GlyA3B4 introduced by GmGlyA3B4_T03TALE nuclease

SEQ ID NO: 6101 - DNA, 637 bp, Artificial; identical to SEQ ID NO: 5203
  Mutations within GlyA3B4 introduced by GmGlyA3B4_T03TALE nuclease

SEQ ID NO: 6102 - DNA, 622 bp, Artificial; identical to SEQ ID NO: 5263
  Mutations within GlyA3B4 introduced by GmGlyA3B4_T03TALE nuclease

SEQ ID NO: 6103 - DNA, 660 bp, Artificial; identical to SEQ ID NO: 4874
  Mutations within GlyA3B4 introduced by GmGlyA3B4_T03TALE nuclease

SEQ ID NO: 6104 - DNA, 646 bp, Artificial; identical to SEQ ID NO: 4907
  Mutations within GlyA3B4 introduced by GmGlyA3B4_T03TALE nuclease

SEQ ID NO: 6105 - DNA, 642 bp, Artificial
  Mutations within GlyA3B4 introduced by GmGlyA3B4_T03TALE nuclease
gttcatgtacggttgcagatataaacgaagcatagcttatgtatgaggtgtaacaaaattggaaacaatagccatgcaaggtgaagaatgtcaccaactcagaaacccttcttcattgacgtgtccctcactcactctcctctcttcactataaatcgccactcttcgtgttctccacttcaccaactccttcaaacttattaacactttccttagttcaatatggggaagcccttcttcactctctctctttcttccctttgcttgctactcttgtcgttagtgcatgctttgctattacctcaacgcgttggaacccgaccaccgcgttgagtccgaaggtggtcttattgaaacatggaactctcaacaccctgagctgcaatgcgccggtgtcactgtttccaaacgcaccctcaaccgcaacggcctccacttgccatcttactcaccttatccccaaatgatcattgtcgttcaaggtgcgtaatattagtaagaagtatttatcagcttaacgtgataacaataatagtaatatgaaatatttattaaattttttataattaatctctgctagaaaatttgattaatcatttttagtagaatttgttttttctcaactaggttttaaacaccaca

SEQ ID NO: 6106 - DNA, 646 bp, Artificial
  Mutations within GlyA3B4 introduced by GmGlyA3B4_T03TALE nuclease
gttcatgtacggttgcagatataaacgaagcatagcttatgtatgaggtgtaacaaaattggaaacaatagccatgcaaggtgaagaatgtcaccaactcagaaacccttcttcattgacgtgtccctcactcactctcctctcttcactataaatcgccactcttcgtgttctccacttcaccaactccttcaaacttattaacactttccttagttcaatatggggaagcccttcttcactctctctctttcttccctttgcttgctactcttgtcgagtgcatgcttttgctattacctccagcaagtgccaactcaacaacctcaacgcgttggaacccgaccaccgcgttgagtccgaaggtggtcttattgaaacatggaactctcaacaccctgagctgcaatgcgccggtgtcactgtttccaaacgcaccctcaaccgcaacggcctccacttgccatcttactcaccttatccccaaatgatcattgtcgttcaaggtgcgtaatattagtaagaagtatttatcagcttaacgtgataacaataatagtaatatgaaatatttattaaatttttataatttaatctctgctagaaaatttgattaatcatttttagtagaatttgtttttctcaa

SEQ ID NO: 6107 - DNA, 622 bp, Artificial; identical to SEQ ID NO: 5263
  Mutations within GlyA3B4 introduced by GmGlyA3B4_T03TALE nuclease

SEQ ID NO: 6108 - DNA, 433 bp, Artificial
  Mutations within GlyA3B4 introduced by GmGlyA3B4_T03TALE nuclease
gttcatgtacggttgcagatataaacgaagcatagcttatgtatgaggtgtaacaaaattggaaacaatagccatgcaaggtgaagaatgtcaccaactcaacaacctcaacgcgttggaacccgaccaccgcgttgagtccgaaggtggtcttattgaaacatggaactctcaacaccctgagctgcaatgcgccggtgtcactgtttccaaacgcaccctcaaccgcaacggcctccacttgccatcttactcaccttatccccaaatgatcattgtcgttcaaggtgcgtaatattagtaagaagtatttatcagcttaacgtgataacaataatagtaatatgaaatatttattaattttttataattaatctctgctagaaaatttgattaatcatttttagtagaattttgttttttctcaactagg

SEQ ID NO: 6109 - DNA, 648 bp, Artificial
  Mutations within GlyA3B4 introduced by GmGlyA3B4_T03TALE nuclease
gttcatgtacggttgcagatataaacgaagcatagcttatgtatgaggtgtaacaaaattggaaacaatagccatgcaaggtgaagaatgtcaccaactcagaaacccttcttcattgacgtgtccctcactcactctcctctcttcactataaatcgccactcttcgtgttctccacttcaccaactccttcaaacttattaacactttccttagttcaatatggggaagcccttcttcactctctctctttcttccctttgcttgctactcttgtcgagtgcatgctttgctattacctccagcaactcaacaacctcaacgcgttggaacccgaccaccgcgttgagtccgaaggtggtcttattgaaacatggaactctcaacaccctgagctgcaatgcgccggtgtcactgtttccaaacgcaccctcaaccgcaacggcctccacttgccatcttactcaccttatccccaaatgatcattgtcgttcaaggtgcgtaatattagtaagaagtatttatcagcttaacgtgataacaataatagtaatatgaaatatttattaaatttttataattaatctctgctagaaaatttgattaatcattttagtagaatttgttttctcaactaggttttaaaa

SEQ ID NO: 6110 - DNA, 660 bp, Artificial; identical to SEQ ID NO: 4874
  Mutations within GlyA3B4 introduced by GmGlyA3B4_T03TALE nuclease

SEQ ID NO: 6111 - DNA, 624 bp, Artificial
  Mutations within GlyA3B4 introduced by GmGlyA3B4_T03TALE nuclease
gttcatgtacggttgcagatataaacgaagcatagcttatgtatgaggtgtaacaaaattggaaacaatagccatgcaaggtgaagaatgtcaccaactcagaaaccccttcttcattgacgtgtccctcactcactctcctctcttcactataaatcgccactcttcgtgttctccacttcaccaaactccttcaaacttattaacactttccttagttcaatatggggaagcccttcttcactctctctctttcttccctttgcttgctactcttgtcgagtgcatgctttgctattacctccagcaagttagtgccaactcaacaacctcaacgcgttggaacccgaccaccgcgttgagtccgaaggtggtcttattgaaacatggaactctcaacaccctgagctgcaatgcgccggtgtcactgtttccaaaacgcaccctcaaccgcaacggcctccacttgccaatcttactcaccttatccccaaactgatcattgtcgttcaaggtgcgtaatattagtaagaagtatttatcagcttaacgtgataacaataatagtaatatgaaatatttattaaatttttataattaatctctgctagaaaatttgattaa

SEQ ID NO: 6112 - DNA, 666 bp, Artificial
  Mutations within GlyA3B4 introduced by GmGlyA3B4_T03TALE nuclease
  misc_feature (532): n is a or c or t or g
gttcatgtacggttgcagatataaacgaagcatagcttatgtatgaggtgtaacaaaattggaaacaatagccatgcaaggtgaagaatgtcaccaactcagaaacccttcttcattgacgtgtccctcactcactctcctctcttcactataaatcgccactcttcgtgttctccacttcaccaactccttcaaacttattaacactttccttagttcaatatggggaagcccttcttcactctctctctttcttccctttgcttgctactcttgtcgagtgcatgctttgctattacctccagcaagttcgagtgccaactcaacaacctcaacgcgttggaacccgaccaccgcgttgagtccgaaggtggtcttattgaaacatggaactctcaacaccctgagctgcaatgcgccggtgtcactgtttccaaacgcaccctcaaccgcaacggcctccacttgccatcttactcaccttatccccaaatgatcattgtcgttcaaggtgcgtaatattagtaagagnatttatcagcttaacgtgataacaataatagtaatatgaaatatttattaaatttttataattaatctctgctagaaaatttgattaatcattttagtagaatttgtttttctcaactaggttttaaaacacca

SEQ ID NO: 6113 - DNA, 652 bp, Artificial
  Mutations within GlyA3B4 introduced by GmGlyA3B4_T03TALE nuclease
gttcatgtacggttgcagatataaacgaagcatagcttatgtatgaggtgtaacaaaattggaaacaatagccatgcaaggtgaagaatgtcaccaactcagaaacccttcttcattgacgtgtccctcactcactctcctctcttcactataaatcgccactcttcgtgttctccacttcaccaactccttcaaacttattaacactttccttagttcaatatggggaagcccttcttcactctctctctttcttccctttgcttgctactcttgtcgagtgcatgctttgctattacctccagcaagttgagtgccaactcaacaacctcaacgcgttggaacccgaccaccgcgttgagtccgaaggtggtcttattgaaacatggaactctcaacaccctgagctgcaatgcgccggtgtcactgtttccaaacgcaccctcaaccgcaacggcctccacttgccatcttactcaccttatccccaaatgatcattgtcgttcaaggtgcgtaatattagtaagaagtatttatcagcttaacgtgataacaataatagtaatatgaaatatttattaaatttttataattaatctctgctagaaaatttgattaatcattttagtagaatttgttttctcaactagg

SEQ ID NO: 6114 - DNA, 508 bp, Artificial
  Mutations within GlyA3B4 introduced by GmGlyA3B4_T03TALE nuclease
gttcatgtacggttgcagatataaacgaagcatagcttatgtatgaggtgtaacaaaatttgggaaacaatagccatgcaaggtgaagaatgtcaccaactcagaaacccttcttcattgacgtgtccctcactcactctcctctcttcactataaatcgccactcttcgtgttctccacttcaccaactccttcaaacttattaacactttccttagttcaatatgggggaagcccttcttcactctctctctttcttccctttgcttgctactcttgtcgagtgcatgctttgctattacctccacttgccatcttactcaccttatccccaaatgatcattgtcgttcaaggtgcgtaatattagtaagaagtatttatcagcttaacgtgataacaataatagtaatatgaaatatttattaaattttttataattaatctctgctagaaaatttgattaatcatttttagtagaatttgtttttctcaactaggttttaaaca

SEQ ID NO: 6115 - DNA, 646 bp, Artificial
  Mutations within GlyA3B4 introduced by GmGlyA3B4_T03TALE nuclease
gttcatgtacggttgcagatataaacgaagcatagcttatgtatgaggtgtaacaaaattggaaacaatagccatgcaaggtgaagaatgtcaccaactcagaaacccttcttcattgacgtgtccctcactcactctcctctcttcactataaatcgccactcttcgtgttctccacttcaccaactccttcaaacttattaacactttccttagttcaatatggggaagcccttcttcactctctctctttcttccctttgcttgctactcttgtcgagtgcatgctttgctattacctccagcaagtgtgccaactcaacaacctcaacgcgttggaacccgaccaccgcgttgagtccgaaggtggtcttattgaaacatggaactctcaacaccctgagctgcaatgcgccggtgtcactgtttccaaacgcaccctcaaccgcaacggcctccacttgccatcttactcaccttatccccaaatgatcattgtcgttcaaggtgcgtaatattagtaagaagtatttatcagcttaacgtgataacaataatagtaatatgaaatatttattaaatttttataattaatctctgctagaaaatttgattaatcatttttagtagaatttgtttttctcaa

SEQ ID NO: 6116 - DNA, 661 bp, Artificial
  Mutations within GlyA3B4 introduced by GmGlyA3B4_T03TALE nuclease
gttcatgtacggttgcagatataaacgaagcatagcttatgtatgaggtgtaacaaaattggaaacaatagccatgcaaggtgaagaatgtcaccaactcagaaacccttcttcattgacgtgtccctcactcactctcctctcttcactataaatcgccactcttcgtgttctccacttcaccaactccttcaaacttattaacactttccttagttcaatatggggaagcccttcttcactctctctctttcttccctttgcttgctactcttgtcgagtgcatgctttgctattacctccagcaaagtgccaactcaacaacctcaacgcgttggaacccgaccaccgcgttgagtccgaaggtggtcttattgaaacatggaactctcaacaccctgagctgcaatgcgccggtgtcactgtttccaaacgcaccctcaaccgcaacggcctccacttgccatcttactcaccttatccccaaatgatcattgtcgttcaaggtgcgtaatattagtaagaagtatttatcagcttaacgtgatacaatatagtaatatgaaatatttattaaatttttataattaatctctgctagaaaatttgattaatcattttagtagaatttgtttttctcaactaggtttttaaaacacca

SEQ ID NO: 6117 - DNA, 636 bp, Artificial; identical to SEQ ID NO: 5803
  Mutations within GlyA3B4 introduced by GmGlyA3B4_T03TALE nuclease

SEQ ID NO: 6118 - DNA, 660 bp, Artificial; identical to SEQ ID NO: 4831
  Mutations within GlyA3B4 introduced by GmGlyA3B4_T03TALE nuclease

SEQ ID NO: 6119 - DNA, 666 bp, Artificial
  Mutations within GlyA3B4 introduced by GmGlyA3B4_T03TALE nuclease
  misc_feature (532): n is a or c or t or g
gttcatgtacggttgcagatataaacgaagcatagcttatgtatgaggtgtaacaaaattggaaacaatagccatgcaaggtgaagaatgtcaccaactcagaaacccttcttcattgacgtgtccctcactcactctcctctcttcactataaatcgccactcttcgtgttctccacttcaccaactccttcaaacttattaacactttccttagttcaatatggggaagcccttcttcactctctctctttcttccctttgcttgctactcttgtcgagtgcatgctttgctattacctccagcaagtttcgagtgccaactcaacaacctcaacgcgttggaacccgaccaccgcgttgagtccgaaggtggtcttattgaacatggaactctcaacaccctgagctgcaatgcgccggtgtcactgtttccaaacgcaccctcaaccgcaacggcctccacttgccatcttactcaccttatccccaaatgatcattgtcgttcaaggtgcgtaatattagtaagagnatttatcagcttaacgtgataacaatatagtaatatgaaaatatttattaaatttttataattaatctctgctagaaaatttgattaatcattttagtagaatttgtttttctcaactaggtttttaaacacca

SEQ ID NO: 6120 - DNA, 627 bp, Artificial
  Mutations within GlyA3B4 introduced by GmGlyA3B4_T03TALE nuclease
gttcatgtacggttgcagatataaacgaagcatagcttatgtatgaggtgtaacaaaattggaaacaatagccatgcaaggtgaagaatgtcaccaactcagaaacccttcttcattgacgtgtccctcactcactctcctctcttcactataaatcgccactcttcgtgttctccacttcaccaactccttcaaacttattaacactttccttagttcaatatggggaagcccttcttcactctctctctttcttccctttgcttgctactcttgtcgagtgccaactcaacaacctcaacgcgttggaacccgaccaccgcgttgagtccgaaggtggtcttattgaaacatggaactctcaacaccctgagctgcaatgcgccggtgtcactgtttccaaacgcaccctcaaccgcaacggcctccacttgccatcttactcaccttatccccaaatgatcattgtcgttcaaggtgcgtaatattagtaagaagtatttatcagcttaacgtgataacaataatagtaatatgaaatatttattaaattttttataattaatctctgctagaaaatttgattaatcatttttagtagaatttgtttttctcaactaggttttt

SEQ ID NO: 6121 - DNA, 647 bp, Artificial; identical to SEQ ID NO: 5892
  Mutations within GlyA3B4 introduced by GmGlyA3B4_T03TALE nuclease

SEQ ID NO: 6122 - DNA, 617 bp, Artificial; identical to SEQ ID NO: 2437
  Mutations within GlyA3B4 introduced by GmGlyA3B4_T03TALE nuclease

SEQ ID NO: 6123 - DNA, 646 bp, Artificial
  Mutations within GlyA3B4 introduced by GmGlyA3B4_T03TALE nuclease
gttcatgtacggttgcagatataaacgaagcatagcttatgtatgaggtgtaacaaaattggaaacaatagccatgcaaggtgaagaatgtcaccaactcagaaacccttcttcattgacgtgtccctcactcactctcctctcttcactataaatcgccactcttcgtgttctccacttcaccaactccttcaaacttattaacactttccttagttcaatatggggaagcccttcttcactctctctctttcttccctttgcttgctactcttgtcgagtgcatgctttgctattacctccagcaagttcaacaacctcaacgcgttggaacccgaccaccgcgttgagtccgaaggtggtcttattgaaacatggaactctcaacaccctgagctgcaatgcgccggtgtcactgtttccaaacgcaccctcaaccgcaacggcctccacttgccatcttactcaccttatccccaaatgatcattgtcgttcaaggtgcgtaaatattagtaagaagtatttatcagcttaacgtgataacaataatagtaatatgaaatatttattaaattttttataattaatctctgctagaaaatttgattaatcatttttagtagaatttgttttttctcaactagg

SEQ ID NO: 6124 - DNA, 643 bp, Artificial
  Mutations within GlyA3B4 introduced by GmGlyA3B4_T03TALE nuclease
gttcatgtacggttgcagatataaacgaagcatagcttatgtatgaggtgtaacaaaattggaaacaatagccatgcaaggtgaagaatgtcaccaactcagaaacccttcttcattgacgtgtccctcactcactctcctctcttcactataaatcgccactcttcgtgttctccacttcaccaactccttcaaacttattaacactttccttagttcaatatggggaagcccttcttcactctctctctttcttccctttgcttgctactcttgtcgagtgcatgctttgctattacctccagcaaagagtgccaactcaacaacctcaacgcgttggaacccgaccaccgcgttgagtccgaaggtggtcttattgaaacatggaactctcacaccctgagctgcaatgcgccggtgtcactgtttccaaacgcaccctcaaccgcaacggcctccacttgccatcttactcaccttatccccaaatgatcattgtcgttcaaggtgcgtaatattagtaagaagtatttatcagcttaacgtgataacaatatagtaatatgaaatatttattaaatttttataattaatctctgctagaaaatttgattaatcattttagtagaatttgttttctcaa

SEQ ID NO: 6125 - DNA, 658 bp, Artificial
  Mutations within GlyA3B4 introduced by GmGlyA3B4_T03TALE nuclease
gttcatgtacggttgcagatataaacgaagcatagcttatgtatgaggtgtaacaaaattggaaacaatagccatgcaaggtgaagaatgtcaccaactcagaaacccttcttcattgacgtgtccctcactcactctcctctcttcactataaatcgccactcttcgtgttctccacttcaccaactccttcaaacttattaacactttccttagttcaatatggggaagcccttcttcactctctctctttcttccctttgcttgctactcttgtcgagtgcatgctttgctattacctccagcaagttagtgccaactcaacaacctcaacgcgttggaacccgaccaccgcgttgagtccgaaggtggtcttattgaaacatggaactctcaacaccctgagctgcaatgcgccggtgtcactgtttccaaacgcaccctcaaccgcaacggcctccacttgccatcttactcaccttatccccaaatgatcattgtcgttcaaggtgcgtaatattagtaagaagtatttatcagcttaacgtgataacaatatagtaatatgaaatatttattaaatttttataattaatctctgctagaaaatttgattaatcattttagtagaatttgttttctcaactaggttttaaaa

SEQ ID NO: 6126 - DNA, 647 bp, Artificial; identical to SEQ ID NO: 5693
  Mutations within GlyA3B4 introduced by GmGlyA3B4_T03TALE nuclease

SEQ ID NO: 6127 - DNA, 648 bp, Artificial
  Mutations within GlyA3B4 introduced by GmGlyA3B4_T03TALE nuclease
gttcatgtacggttgcagatataaacgaagcatagcttatgtatgaggtgtaacaaaattggaaacaatagccatgcaaggtgaagaatgtcaccaactcagaaacccttcttcattgacgtgtccctcactcactctcctctcttcactataaatcgccactcttcgtgttctccacttcaccaactccttcaaacttattaacactttccttagttcaatatggggaagcccttcttcactctctctctttcttccctttgcttgctactcttgtcgagtgcatgctttgctattacctccagcaagttgccaactcaacaacctcaacgcgttggaacccgaccaccgcgttgagtccgaaggtggtcttattgaaacatggaactctcaacaccctgagctgcaatgcgccggtgtcactgtttccaaacgcaccctcaaccgcaacggcctccacttgccatcttactcaccttatccccaaatgatcattgtcgttcaaggtgcgtaatattagtaagaagtatttatcagcttaacgtgataacaataatagtaatatgaaatatttattaaatttttataattaatctctgctagaaaatttgattaatcattttagtagaatttgttttctcaactagg

SEQ ID NO: 6128 - DNA, 658 bp, Artificial
  Mutations within GlyA3B4 introduced by GmGlyA3B4_T03TALE nuclease
gttcatgtacggttgcagatataaacgaagcatagcttatgtatgaggtgtaacaaaattggaaacaatagccatgcaaggtgaagaatgtcaccaactcagaaacccttcttcattgacgtgtccctcactcactctcctctcttcactataaatcgccactcttcgtgttctccacttcaccaactccttcaaacttattaacactttccttagttcaatatggggaagcccttcttcactctctctctttcttccctttgcttgctactcttgtcgagtgcatgctttgctattacctccagcaagtgccaactcaacaacctcaacgcgttggaacccgaccaccgcgttgagtccgaaggtggtcttattgaaacatggaactctcaacaccctgagctgcaatgcgccggtgtcactgtttccaaacgcaccctcaaccgcaacggcctccacttgccatcttactcaccttatccccaaatgatcattgtcgttcaaggtgcgtaatattagtaagaagtatttatcagcttaacgtgataacaatatagtaatatgaaatatttattaaatttttataattaatctctgctagaaaatttgattaatcattttagtagaatttgttttctcaactaggttttaaacacca

SEQ ID NO: 6129 - DNA, 657 bp, Artificial
  Mutations within GlyA3B4 introduced by GmGlyA3B4_T03TALE nuclease
gttcatgtacggttgcagatataaacgaagcatagcttatgtatgaggtgtaacaaaattggaaacaatagccatgcaaggtgaagaatgtcaccaactcagaaacccttcttcattgacgtgtccctcactcactctcctctcttcactataaatcgccactcttcgtgttctccacttcaccaactccttcaaacttattaacactttccttagttcaatatggggaagcccttcttcactctctctctttcttccctttgcttgctactcttgtcgagtgcatgctttgctattacctccagcaagttcgagtgccaactcaacaacctcaacgcgttggaacccgaccaccgcgttgagtccgaaggtggtcttattgaaacatggaactctcaacaccctgagctgcaatgcgccggtgtcactgtttccaaacgcaccctcaaccgcaacggcctccacttgccatcttactcaccttatccccaaatgatcattgtcgttcaaggtgcgtaatattagtaagagtatttatcagcttaacgtgataacaataatagtaatatgaaatatttattaaatttttataattaatctctgctagaaaatttgattaatcattttagtagaatttgttttctcaactaggttttt

SEQ ID NO: 6130 - DNA, 653 bp, Artificial
  Mutations within GlyA3B4 introduced by GmGlyA3B4_T03TALE nuclease
  misc_feature (504); (536): n is a or c or t or g
gttcatgtacggttgcagatataaacgaagcatagcttatgtatgaggtgtaacaaaattggaaacaatagccatgcaaggtgaagaatgtcaccaactcagaaacccttcttcattgacgtgtccctcactcactctcctctcttcactataaatcgccactcttcgtgttctccacttcaccaactccttcaaacttattaacactttccttagttcaatatggggaagcccttcttcactctctctctttcttccctttgcttgctactcttgtcgagtgcatgctttgctattacctccagcaagttcgagtgccaactcaacaacctcaacgcgttggaacccgaccaccgcgttggatcgatgcgacgttgattcgaatattgaagcatgactctcaacaccctgagctgcaatgcgccggtgtcactgtttccaaacgcaccctcaaccgcaacggcctccacttgccatcttactcaccttatccccaaatgatcntttcgttcaaggtgcgtaatattagtaagagnatttatcagcttaacgtgataacaataatagtaatatgaaatatttattaaatttttataattaatctctgctagaaaatttgattaatcattttagtagaatttgtttttctcaac

SEQ ID NO: 6131 - DNA, 580 bp, Artificial
  Mutations within GlyA3B4 introduced by GmGlyA3B4_T03TALE nuclease
  misc_feature (349): n is a or c or t or g
gttcatgtacggttgcagatataaacgaagcatagcttatgtatgaggtgtaacaaaattggaaacaatagccatgcaaaggtgaagaatgtcaccaactcagaaacccttcttcattgacgtgtccctcactcactctcctctcttcactataaatcgccactcttcgtgttctccacttcaccaactccttcaaacttattaacactttccttagttcaatatggggaagcccttcttcactctctctctttcttccctttgcttgctactcttgtcgagtgccaactcaacaacctcaacgcgttggaacccgaccaccgcgttgagtccgaaggtggtcttattnaaacatggaactctcaacaccctgagctgcaatgcgccggtgtcactgtttccaaacgcaccctcaaccgcaacggcctccacttgccatcttactcaccttatccccaaatgatcattgtcgttcaaggtgcgtaatattagtaagaagtatttatcagcttaacgtgataacaataatagtaatatgaaatatttattaaattttttataattaatctctgctagaaaa

SEQ ID NO: 6132 - DNA, 617 bp, Artificial; identical to SEQ ID NO: 2437
  Mutations within GlyA3B4 introduced by GmGlyA3B4_T03TALE nuclease

SEQ ID NO: 6133 - DNA, 662 bp, Artificial
  Mutations within GlyA3B4 introduced by GmGlyA3B4_T03TALE nuclease
gttcatgtacggttgcagatataaacgaagcatagcttatgtatgaggtgtaacaaaattggaaacaatagccatgcaaggtgaagaatgtcaccaactcagaaacccttcttcattgacgtgtccctcactcactctcctctcttcactataaatcgccactcttcgtgttctccacttcaccaactccttcaaacttattaacactttccttagttcaatatggggaagcccttcttcactctctctctttcttccctttgcttgctactcttgtcgagtgcatgctttgctattacctccagcaacgagtgccaactcaacaacctcaacgcgttggaacccgaccaccgcgttgagtccgaaggtggtcttattgaaacatggaactctcaacaccctgagctgcaatgcgccggtgtcactgtttccaaacgcaccctcaaccgcaacggcctccacttgccatcttactcaccttatccccaaatgatcattgtcgttcaaggtgcgtaatattagtaagagtatttatcagcttaacgtgataacaataatagtaatatgaaatatttattaaatttttataattaatctctgctagaaaatttgattaatcattttagtagaatttgtttttctcaactaggttttaaacacca

SEQ ID NO: 6134 - DNA, 651 bp, Artificial; identical to SEQ ID NO: 5267
  Mutations within GlyA3B4 introduced by GmGlyA3B4_T03TALE nuclease

SEQ ID NO: 6135 - DNA, 652 bp, Artificial
  Mutations within GlyA3B4 introduced by GmGlyA3B4_T03TALE nuclease
gttcatgtacggttgcagatataaacgaagcatagcttatgtatgaggtgtaacaaaaattggaaacaatagccatgcaaggtgaagaatgtcaccaactcagaaacccttcttcattgacgtgtccctcactcactctcctctcttcactataaatcgccactcttcgtgttctccacttcaccaactccttcaaacttattaacactttccttagttcaatatggggaagcccttcttcactctctctctttcttccctttgcttgctactcttgtcgagtgcatgctttgctattacctccagcaagttgagtgccaactcaacaacctcaacgcgttggaacccgaccaccgcgttgagtccgaaggtggtcttattgaaacatggaactctcaacaccctgagctgcaatgcgccggtgtcactgtttccaaacgcaccctcaaccgcaacggcctccacttgccatcttactcaccttatccccaaatgatcattgtcgttcaaggtgcgtaatattagtaagaagtatttatcagcttaacgtgataacaatatagtaatatgaaatatttattaaatttttataattaatctctgctagaaaatttgattaatcattttagtagaatttgttttctcaactagg

SEQ ID NO: 6136 - DNA, 666 bp, Artificial
  Mutations within GlyA3B4 introduced by GmGlyA3B4_T03TALE nuclease
gttcatgtacggttgcagatataaacgaagcatagcttatgtatgaggtgtaacaaaattggaaacaatagccatgcaaggtgaagaatgtcaccaactcagaaacccttcttcattgacgtgtccctcactcactctcctctcttcactataaatcgccactcttcgtgttctccacttcaccaactccttcaaacttattaacactttccttagttcaatatggggaagcccttcttcactctctctctttcttccctttgcttgctactcttgtcgagtgcatgctttgctattacctccagcaaggagtgccaactcaacaacctcaacgcgttggaacccgaccaccgcgttgagtccgaaggtggtcttattgaaacatggaactctcaacaccctgagctgcaatgcgccggtgtcactgtttccaaacgcaccctcaaccgcaacggcctccacttgccatcttactcaccttatccccaaatgatcattgtcgttcaaggtgcgtaatattagtaagaagtatttatcagcttaacgtgataacaatatagtaatatgaaatatttattaaaatttttataattaatctctgctagaaaatttgattaaatcatttttagtgaatttgtttttctcaactaggtttttaaaacacca

SEQ ID NO: 6137 - DNA, 653 bp, Artificial
  Mutations within GlyA3B4 introduced by GmGlyA3B4_T03TALE nuclease
gttcatgtacggttgcagatataaacgaagcatagcttatgtatgaggtgtaacaaaattggaaacaatagccatgcaaggtgaagaatgtcaccaactcagaaacccttcttcattgacgtgtccctcactcactctcctctcttcactataaatcgccactcttcgtgttctccacttcaccaactccttcaaacttattaacactttccttagttcaatatggggaagcccttcttcactctctctctttcttccctttgcttgctactcttgtcgagtgcatgctttgctattacctccagcaaggagtgccaactcaacaacctcaacgcgttggaacccgaccaccgcgttgagtccgaaggtggtcttattgaacatggaactctcaacaccctgagctgcaatgcgccggtgtcactgtttccaaacgcaccctcaaccgcaacggcctccacttgccatcttactcaccttatccccaaatgatcattgtcgttcaaggtgcgtaatattagtaagaagtatttatcagcttaacgtgataacaatatagtaatatgaaatatttattaaatttttataattaatctctgctagaaaatttgattaatcattttagtagaatttgtttttctcaactaggtttt

SEQ ID NO: 6138 - DNA, 660 bp, Artificial
  Mutations within GlyA3B4 introduced by GmGlyA3B4_T03TALE nuclease
gttcatgtacggttgcagatataaacgaagcatagcttatgtatgaggtgtaacaaaattggaaacaatagccatgcaaggtgaagaatgtcaccaactcagaaacccttcttcattgacgtgtccctcactcactctcctctcttcactataaatcgccactcttcgtgttctccacttcaccaactccttcaaacttattaacactttccttagttcaatatggggaagcccttcttcactctctctctttcttccctttgcttgctactcttgtcgagtgcatgctttgctattacctccagcaagttcagtgccaactcaacaacctcaacgcgttggaacccgaccaccgcgttgagtccgaaggtggtcttattgaaacatggaactctcaacaccctgagctgcaatgcgccggtgtcactgtttccaaacgcaccctcaaccgcaacggcctccacttgccatcttactcaccttatccccaaatgatcattgtcgttcaaggtgcgtaatattagtaagaagtatttatcagcttaacgtgataacaataatagtaatatgaaatatttattaaatttttataattaatctctgctagaaaatttgattaatcattttagtagaatttgtttttctcaactaggttttaaa

SEQ ID NO: 6139 - DNA, 661 bp, Artificial
  Mutations within GlyA3B4 introduced by GmGlyA3B4_T03TALE nuclease
gttcatgtacggttgcagatataaacgaagcatagcttatgtatgaggtgtaacaaaattggaaacaatagccatgcaaggtgaagaatgtcaccaactcagaaacccttcttcattgacgtgtccctcactcactctcctctcttcactataaatcgccactcttcgtgttctccacttcaccaactccttcaaacttattaacactttccttagttcaatatggggaagcccttcttcactctctctctttcttccctttgcttgctactcttgtcgagtgcatgctttgctattacctccagcaagtgtgccaactcaacaacctcaacgcgttggaaccgaccaccgcgttgagtccgaaggtggtcttattgaaacatggaactctcaacaccctgagctgcaatgcgccggtgtcactgtttccaaacgcaccctcaaccgcaacggcctccacttgccatcttactcaccttatccccaaatgatcattgtcgttcaaggtgcgtaatattagtaagaagtatttatcagcttaacgtgataacaataatagtaatatgaaatatttattaaatttttataattaatctctgctagaaaatttgattaatcattttagtagaatttgttttctcaactaggttttaaaacacca

SEQ ID NO: 6140 - DNA, 645 bp, Artificial; identical to SEQ ID NO: 5301
  Mutations within GlyA3B4 introduced by GmGlyA3B4_T03TALE nuclease

SEQ ID NO: 6141 - DNA, 618 bp, Artificial; identical to SEQ ID NO: 5404
  Mutations within GlyA3B4 introduced by GmGlyA3B4_T03TALE nuclease

SEQ ID NO: 6142 - DNA, 610 bp, Artificial
  Mutations within GlyA3B4 introduced by GmGlyA3B4_T03TALE nuclease
gttcatgtacggttgcagatataaacgaagcatagcttatgtatgaggtgtaacaaaattggaaacaatagccatgcaaggtgaagaatgtcaccaactcagaaacccttcttcattgacgtgtccctcactcactctcctctcttcactataaatcgccactcttcgtgttctccacttcaccaactccttcaaacttattaacactttccttagttcaatatggggaagcccttcttcactctctctctttcttccctttgcttgctactcttgtcgagtgcatgctttgctattacctccagcaaactcaacaacctcaacgcgttggaacccgaccaccgcgttgagtccgaaggtggtcttattgaacatggaactctcaacaccctgagctgcaatgcgccggtgtcactgtttccaaacgcaccctcaaccgcaacggcctccacttgccatcttactcaccttatccccaaatgatcattgtcgttcaaggtgcgtaatattagtaagaagtatttatcagcttaacgtgataacaataatagtaatatgaaatatttattaaatttttataattaatctctgctagaaaatttgattaatc

SEQ ID NO: 6143 - DNA, 622 bp, Artificial; identical to SEQ ID NO: 5306
  Mutations within GlyA3B4 introduced by GmGlyA3B4_T03TALE nuclease

SEQ ID NO: 6144 - DNA, 590 bp, Artificial
  Mutations within GlyA3B4 introduced by GmGlyA3B4_T03TALE nuclease
gttcatgtacggttgcagatataaacgaagcatagcttatgtatgaggtgtaacaaaattggaaacaatagccatgcaaggtgaagaatgtcaccaactcagaaacccttcttcattgacgtgtccctcactcactctcctctcttcactataaatcgccactcttcgtgttctccacttcaccaactccttcaaacttattaacactttccttagttcaatatggggaagcccttcttcactctctctctttcttccctttgcttgctactcttgtcgagtgcatgctttgctattacctccagcaagtcgtgccaactcaacaacctcaacgcgttggaacccgaccaccgcgttgagtccgaaggtggtcttattgaaacatggaactctcaacaccctgagctgcaatgcgccggtgtcactgtttccaaacgcaccctcaaccgcaacggcctccacttgccatcttactcaccttatccccaaatgatcattgtcgttcaaggtgcgtaatattagtaagaagtatttatcagcttaacgtgataacaatatagtaatatgaaatatttattaaatttttataa

SEQ ID NO: 6145 - DNA, 603 bp, Artificial
  Mutations within GlyA3B4 introduced by GmGlyA3B4_T03TALE nuclease
gttcatgtacggttgcagatataaacgaagcatagcttatgtatgaggtgtaacaaaaattggaaacaatagccatgcaaggtgaagaatgtcaccaactcagaaacccttcttcattgacgtgtccctcactcactctcctctcttcactataaatcgccactcttcgtgttctccacttcaccaactccttcaaacttattaacactttccttagttcaatatggggaagcccttcttcactctctctctttcttccctttgcttgctactcttgtcgagtgccaactcaacaacctcaacgcgttggaacccgaccaccgcgttgagtccgaaggtggtcttattgaaacatggaactctcaacaccctgagctgcaatgcgccggtgtcactgtttccaaacgcaccctcaaccgcaacggcctccacttgccatcttactcaccttatccccaaatgatcattgtcgttcaaggtgcgtaatattagtaagaagtatttatcagcttaacgtgataacaataatagtaatatgaaatatttattaattttttataattaatctctgctagaaaatttgattaatcatttttagtagaa

SEQ ID NO: 6146 - DNA, 660 bp, Artificial; identical to SEQ ID NO: 4831
  Mutations within GlyA3B4 introduced by GmGlyA3B4_T03TALE nuclease

SEQ ID NO: 6147 - DNA, 633 bp, Artificial
  Mutations within GlyA3B4 introduced by GmGlyA3B4_T03TALE nuclease
gttcatgtacggttgcagatataaacgaagcatagcttatgtatgaggtgtaacaaaattggaaacaatagccatgcaaggtgaagaatgtcaccaactcagaaacccttcttcattgacgtgtccctcactcactctcctctcttcactataaatcgccactcttcgtgttctccacttcaccaactccttcaaacttattaacactttccttagttcaatatggggaagcccttcttcactctctctctttcttccctttgcttgctactcttgtcgagtgccaactcaacaacctcaacgcgttggaacccgaccaccgcgttgagtccgaaggtggtcttattgaaacatggaactctcaacaccctgagctgcaatgcgccggtgtcactgtttccaaacgcaccctcaaccgcaacggcctccacttgccatcttactcaccttatcccccaaatgatcattgtcgttcaaggtgcgtaatattagtaagaagtatttatcagcttaacgtgataacaataatagtaatatgaaatatttattaaattttttataattaatctctgctagaaaatttgattaatcatttttagtagaatttgtttttctcaactaggtttttaaaca

SEQ ID NO: 6148 - DNA, 640 bp, Artificial
  Mutations within GlyA3B4 introduced by GmGlyA3B4_T03TALE nuclease
gttcatgtacggttgcagatataaacgaagcatagcttatgtatgaggtgtaacaaaattggaaacaatagccatgcaaggtgaagaatgtcaccaactcagaaacccttcttcatcagcgtgtcccctcactcactctcctctcttcactataaatcgccactcttcgtgttctccacttcaccaactccttcaaacttattaacactttccttagttcaatatggggaagcccttcttcactctctctctttcttccctttgcttgctactcttgtcgagtgcatgctttgctattacctccagcaaccaactcaacaacctcaacgcgttggaacccgaccaccgcgttgagtccgaaggtggtcttattgaaacatggaactctcaacaccctgagctgcaatgcgccggtgtcactgtttccaaacgcaccctcaaccgcaacggcctccacttgccatcttactcaccttatccccaaatgatcattgtcgttcaaggtgcgtaatattagtaagaagtatttatcagcttaacgtgatacaatatagtaatatgaaatatttattaaatttttataattaatctctgctagaaaatttgattaatcatttttagtagaatttgtttttctcaa

SEQ ID NO: 6149 - DNA, 657 bp, Artificial
  Mutations within GlyA3B4 introduced by GmGlyA3B4_T03TALE nuclease
gttcatgtacggttgcagatataaacgaagcatagcttatgtatgaggtgtaacaaaattggaaacaatagccatgcaaggtgaagaatgtcaccaactcagaaaccccttcttcattgacgtgtccctcactcactctcctctcttcactataaatcgccactcttcgtgttctccacttcaccaactccttcaaacttattaacactttccttagttcaatatggggaagcccttcttcactctctctctttcttccctttgcttgctactcttgtcgagtgcatgctttgctattacctccagcaagttgtgccaactcaacaacctcaacgcgttggaacccgaccaccgcgttgagtccgaaggtggtcttattgaaacatggaactctcaacaccctgagctgcaatgcgccggtgtcactgtttccaaacgcaccctcaaccgcaacggcctccacttgccatcttactcaccttatccccaaatgatcattgtcgttcaaggtgcgtaatattagtaagaagtatttatcagcttaacgtgataacaatatagtaatatgaaatatttattaaatttttataattaatctctgctagaaaatttgattaatcattttagtagaatttgttttctcaactaggttttaaa

SEQ ID NO: 6150 - DNA, 647 bp, Artificial
  Mutations within GlyA3B4 introduced by GmGlyA3B4_T03TALE nuclease
gttcatgtacggttgcagatataaacgaagcatagcttatgtatgaggtgtaacaaaattggaaacaatagccatgcaaggtgaagaatgtcaccaactcagaaacccttcttcattgacgtgtccctcactcactctcctctcttcactataaatcgccactcttcgtgttctccacttcaccaactccttcaaacttattaacactttccttagttcaatatggggaagcccttcttcactctctctctttcttccctttgcttgctactcttgtcgagtgcatgctttgctattacctccagcaagtagtgccaactcaacaacctcaacgcgttggaacccgaccaccgcgttgagtccgaaggtggtcttattgaaacatggaactctcaacaccctgagctgcaatgcgccggtgtcactgtttccaaacgcaccctcaaccgcaacggcctccacttgccatcttactcaccttatccccaaatgatcattgtcgttcaaggtgcgtaatattagtaagaagtatttatcagcttaacgtgataacaataatagtaatatgaaatatttattaaatttttataattaatctctgctagaaaatttgattaatcatttttagtagaatttgtttttctcaa

SEQ ID NO: 6151 - DNA, 659 bp, Artificial
  Mutations within GlyA3B4 introduced by GmGlyA3B4_T03TALE nuclease
gttcatgtacggttgcagatataaacgaagcatagcttatgtatgaggtgtaacaaaattggaaacaatagccatgcaaggtgaagaatgtcaccaactcagaaacccttcttcattgacgtgtccctcactcactctcctctcttcactataaatcgccactcttcgtgttctccacttcaccaactccttcaaacttattaacactttccttagttcaatatggggaagcccttcttcactctctctctttcttccctttgcttgctactcttgtcgagtgcatgctttgctattacctccagcaagtcagtgccaactcaacaacctcaacgcgttggaacccgaccaccgcgttgagtccgaaggtggtcttattgaaacatggaactctcaacaccctgagctgcaatgcgccggtgtcactgtttccaaacgcaccctcaaccgcaacggcctccacttgccatcttactcaccttatccccaaatgatcattgtcgttcaaggtgcgtaatattagtaagaagtatttatcagcttaacgtgataacaataatagtaatatgaaatatttattaaatttttataattaatctctgctagaaaatttgattaatcattttagtagaatttgttttctcaactaggttttaaaa

SEQ ID NO: 6152 - DNA, 662 bp, Artificial; identical to SEQ ID NO: 4805
  Mutations within GlyA3B4 introduced by GmGlyA3B4_T03TALE nuclease

SEQ ID NO: 6153 - DNA, 660 bp, Artificial; identical to SEQ ID NO: 4874
  Mutations within GlyA3B4 introduced by GmGlyA3B4_T03TALE nuclease

SEQ ID NO: 6154 - DNA, 660 bp, Artificial; identical to SEQ ID NO: 4831
  Mutations within GlyA3B4 introduced by GmGlyA3B4_T03TALE nuclease

SEQ ID NO: 6155 - DNA, 646 bp, Artificial
  Mutations within GlyA3B4 introduced by GmGlyA3B4_T03TALE nuclease
gttcatgtacggttgcagatataaacgaagcatagcttatgtatgaggtgtaacaaaattggaaacaatagccatgcaaggtgaagaatgtcaccaactcagaaacccttcttcattgacgtgtccctcactcactctcctctcttcactataaatcgccactcttcgtgttctccacttcaccaactccttcaaacttattaacactttccttagttcaatatggggaagcccttcttcactctctctctttcttccctttgcttgctactcttgtcgagtgcatgctttgctattacctccagcaagtagtgccaactcaacaacctcaacgcgttggaacccgaccaccgcgttgagtccgaaggtggtcttattgaaacatggaactctcaacaccctgagctgcaatgcgccggtgtcactgtttccaaacgcaccctcaaccgcaacggcctccacttgccatcttactcaccttatccccaaatgatcattgtcgttcaaggtgcgtaatattagtaagaagtatttatcagcttaacgtgataacaatatagtaatatgaaatatttattaaatttttataatttaatctctgctagaaaatttgattaatcattttagtagaatttgttttctcaac

SEQ ID NO: 6156 - DNA, 606 bp, Artificial
  Mutations within GlyA3B4 introduced by GmGlyA3B4_T03TALE nuclease
gttcatgtacggttgcagatataaacgaagcatagcttatgtatgaggtgtaacaaaattggaaacaatagccatgcaaggtgaagaatgtcaccaactcagaaacccttcttcattgacgtgtccctcactcactctcctctcttcactataaatcgccactcttcgtgttctccacttcaccaactccttcaaacttattaacactttccttagttcaatatggggaagcccttcttcactctctctctttcttccctttgcttgctactcttgtcgagtgcataccaaacacagtgccaactcaacaacctcaacgcgttggaacccgaccaccgcgttgagtccgaaggtggtcttattgaaacatggaactctcaacaccctgagctgcaatgcgccggtgtcactgtttccaaacgcaccctcaaccgcaacggcctccacttgccatcttactcaccttatccccaaatgatcattgtcgttcaaggtgcgtaatattagtaagaagtatttatcagcttaacgtgataacaataatagtaatatgaaatatttattaaattttttataattaatctctgctagaaaatttgattaatc

SEQ ID NO: 6157 - DNA, 663 bp, Artificial
  Mutations within GlyA3B4 introduced by GmGlyA3B4_T03TALE nuclease
gttcatgtacggttgcagatataaacgaagcatagcttatgtatgaggtgtaacaaaattggaaacaatagccatgcaaggtgaagaatgtcaccaactcagaaacccttcttcattgacgtgtccctcactcactctcctctcttcactataaatcgccactcttcgtgttctccacttcaccaactccttcaaacttattaacactttccttagttcaatatggggaagcccttcttcactctctctctttcttccctttgcttgctactcttgtcgagtgcatgctttgctattacctccagcaagttagtgccaactcaacaacctcaacgcgttggaacccgaccaccgcgttgagtccgaaggtggtcttattgaaacatggaactctcaacaccctgagctgcaatgcgccggtgtcactgtttccaaacgcaccctcaaccgcaacggcctccacttgccatcttactcaccttatccccaaatgatcattgtcgttcaaggtgcgtaatattagtaagaagtatttatcagcttaacgtgataacaataatagtaatatgaaatatttattaaatttttataattaatctctgctagaaaatttgattaatcattttagtagaatttgttttctcaactaggttttaaaacacc

SEQ ID NO: 6158 - DNA, 632 bp, Artificial; identical to SEQ ID NO: 4835
  Mutations within GlyA3B4 introduced by GmGlyA3B4_T03TALE nuclease

SEQ ID NO: 6159 - DNA, 611 bp, Artificial
  Mutations within GlyA3B4 introduced by GmGlyA3B4_T03TALE nuclease
gttcatgtacggttgcagatataaacgaagcatagcttatgtatgaggtgtaacaaaattggaaacaatagccatgcaaggtgaagaatgtcaccaactcagaaacccttcttcattgacgtgtccctcactcactctcctctcttcactataaatcgccactcttcgtgttctccacttcaccaactccttcaaacttattaacactttccttagttcaatatggggaagcccttcttcactctctctctttcttccctttgcttgctactcttgtcgagtgcatgctttgctattacctccagcaagttgagtgccaactcaacaacctcaacgcgttggaacccgaccaccgcgttgagtccgaaggtggtcttattgaaacatggaactctcaacaccctgagctgcaatgcgccggtgtcactgtttccaaacgcaccctcaaccgcaacggcctccacttgccatcttactcaccttatccccaaatgatcattgtcgttcaaggtgcgtaatattagtaagaagtatttatcagcttaacgtgataacaataatagtaatatgaaatatttattaaatttttataattaatctctgctagaaaa

SEQ ID NO: 6160 - DNA, 637 bp, Artificial; identical to SEQ ID NO: 5203
  Mutations within GlyA3B4 introduced by GmGlyA3B4_T03TALE nuclease

SEQ ID NO: 6161 - DNA, 591 bp, Artificial
  Mutations within GlyA3B4 introduced by GmGlyA3B4_T03TALE nuclease
gttcatgtacggttgcagatataaacgaagcatagcttatgtatgaggtgtaacaaaattggaaacaatagccatgcaaggtgaagaatgtcaccaactcagaaacccttcttcattgacgtgtccctcactcactctcctctcttcactataaatcgccactcttcgtgttctccacttcaccaactccttcaaacttattaacactttccttagttcaatatggggaagcccttcttcactctctctctttcttccctttgcttgctactcttgtcgagtgcatgctttgctattacctccagcaagttagtgccaactcaacaacctcaacgcgttggaacccgaccaccgcgttgagtccgaaggtggtcttattgaaacatggaactctcaacaccctgagctgcaatgcgccggtgtcactgtttccaaacgcaccctcaaccgcaacggcctccacttgccatcttactcaccttatccccaaatgatcattgtcgttcaaggtgcgtaatattagtaagaagtatttatcagcttaacgtgataacaatatagtaatatgaaatatttattaaatttttataa

SEQ ID NO: 6162 - DNA, 661 bp, Artificial
  Mutations within GlyA3B4 introduced by GmGlyA3B4_T03TALE nuclease
gttcatgtacggttgcagatataaacgaagcatagcttatgtatgaggtgtaacaaaaattggaaacaatagccatgcaaggtgaagaatgtcaccaactcagaaacccttcttcattgacgtgtccctcactcactctcctctcttcactataaatcgccactcttcgtgttctccacttcaccaactccttcaaacttattaacactttccttagttcaatatggggaagcccttcttcactctctctctttcttccctttgcttgctactcttgtcgagtgcatgctttgctattacctccagcagtgccaactcaacaacctcaacgcgttggaacccgaccaccgcgttgagtccgaaggtggtcttattgaaacatggaactctcaacaccctgagctgcaatgcgccggtgtcactgtttccaaacgcaccctcaaccgcaacggcctccacttgccatcttactcaccttatccccaaatgatcattgtcgttcaaggtgcgtaatattagtaagaagtatttatcagcttaacgtgataacaataatagtaatatgaaatatttattaaatttttataattaatctctgctagaaaatttgattaatcattttagtagaatttgtttttctcaactaggttttaaaacacca

SEQ ID NO: 6163 - DNA, 667 bp, Artificial
  Mutations within GlyA3B4 introduced by GmGlyA3B4_T03TALE nuclease
gttcatgtacggttgcagatataaacgaagcatagcttatgtatgaggtgtaacaaaattggaaacaatagccatgcaaggtgaagaatgtcaccaactcagaaacccttcttcattgacgtgtccctcactcactctcctctcttcactataaatcgccactcttcgtgttctccacttcaccaactccttcaaacttattaacactttccttagttcaatatggggaagcccttcttcactctctctctttcttccctttgcttgctactcttgtcgagtgcatgctttgctattacctccagcaagagtgccaactcaacaacctcaacgcgttggaacccgaccaccgcgttgagtccgaaggtggtcttattgaaacatggaactctcaacaccctgagctgcaatgcgccggtgtcactgtttccaaacgcaccctcaaccgcaacggcctccacttgccatcttactcaccttatccccaaatgatcattgtcgttcaaggtgcgtaatattagtaagaagtatttatcagcttaacgtgataacaataatagtaatatgaaaatatttattaaaatttttataatttaaatctctgctagaaaatttgattaatcattttagtagaatttgtttttctcaactaggttttaaaacacca

SEQ ID NO: 6164 - DNA, 658 bp, Artificial
  Mutations within GlyA3B4 introduced by GmGlyA3B4_T03TALE nuclease
  misc_feature (532): n is a or c or t or g
gttcatgtacggttgcagatataaacgaagcatagcttatgtatgaggtgtaacaaaattggaaacaatagccatgcaaggtgaagaatgtcaccaactcagaaacccttcttcattgacgtgtccctcactcactctcctctcttcactataaatcgccactcttcgtgttctccacttcaccaactccttcaaacttattaacactttccttagttcaatatggggaagcccttcttcactctctctctttcttccctttgcttgctactcttgtcgagtgcatgctttgctattacctccagcaagttcgagtgccaactcaacaacctcaacgcgttggaacccgaccaccgcgttgagtccgaaggtggtcttattgaaacatggaactctcaacaccctgagctgcaatgcgccggtgtcactgtttccaaacgcaccctcaaccgcaacggcctccacttgccatcttactcaccttatccccaaatgatcattgtcgttcaaggtgcgtaatattagtaagagnatttatcagcttaacgtgataacaataatagtaatatgaaatatttattaaatttttataattaatctctgctagaaaatttgattaatcattttagtagaatttgtttttctcaactaggttttt

SEQ ID NO: 6165 - DNA, 622 bp, Artificial
  Mutations within GlyA3B4 introduced by GmGlyA3B4_T03TALE nuclease
gttcatgtacggttgcagatataaacgaagcatagcttatgtatgaggtgtaacaaaattggaaacaatagccatgcaaggtgaagaatgtcaccaactcagaaaccccttcttcattgacgtgtccctcactcactctcctctcttcactataaatcgccactcttcgtgttctccacttcaccaactccttcaaacttattaacactttccttagttcaatatggggaagcccttcttcactctctctctttcttccctttgcttgctactcttgtcgagtgcatgctttgctattacctccagcaagttagtgccaactcaacaacctcaacgcgttggaacccgaccaccgcgttgagtccgaaggtggtcttattgaaacatggaactctcaacaccctgagctgcaatgcgccggtgtcactgtttccaaacgcaccctcaaccgcaacggcctccacttgccatcttactcaccttatccccaaatgatcattgtcgttcaaggtgcgtaatattagtaagaagtatttatcagcttaacgtgataacaatatagtaatatgaaatatttattaaatttttataattaatctctgctagaaaatttgattaatca

SEQ ID NO: 6166 - DNA, 644 bp, Artificial
  Mutations within GlyA3B4 introduced by GmGlyA3B4_T03TALE nuclease
gttcatgtacggttgcagatataaacgaagcatagcttatgtatgaggtgtaacaaaattggaaacaatagccatgcaaggtgaagaatgtcaccaactcagaaacccttcttcattgacgtgtccctcactcactctcctctcttcactataaatcgccactcttcgtgttctccacttcaccaactccttcaaacttattaacactttccttagttcaatatggggaagcccttcttcactctctctctttcttccctttgcttgctactcttgtcgagtgcatgtgccaactcaacaacctcaacgcgttggaacccgaccaccgcgttgagtccgaaggtggtcttattgaaacatggaactctcaacacccctgagctgcaatgcgccggtgtcactgtttccaaacgcaccctcaaccgcaacggcctccacttgccatcttactcaccttatccccaaatgatcattgtcgttcaaggtgcgtaatattagtaagaagtatttatcagcttaacgtgataacaataatagtaatatgaaatatttattaaattttttataattaatctctgctagaaaatttgattaatcatttttagtagaatttgttttttctcaactaggttttaaacaccaca

SEQ ID NO: 6167 - DNA, 663 bp, Artificial; identical to SEQ ID NO: 4967
  Mutations within GlyA3B4 introduced by GmGlyA3B4_T03TALE nuclease

SEQ ID NO: 6168 - DNA, 621 bp, Artificial
  Mutations within GlyA3B4 introduced by GmGlyA3B4_T03TALE nuclease
gttcatgtacggttgcagatataaacgaagcatagcttatgtatgaggtgtaacaaaattggaaacaatagccatgcaaggtgaagaatgtcaccaactcagaaacccttcttcattgacgtgtccctcactcactctcctctcttcactataaatcgccactcttcgtgttctccacttcaccaactccttcaaacttattaacactttccttagttcaatatggggaagcccttcttcactctctctctttcttccctttgcttgctactcttgtcgagtgcatgctttgctattacctccagcaaagagtgccaactcaacaacctcaacgcgttggaacccgaccaccgcgttgagtccgaaggtggtcttattgaaacatggaactctcaacaccctgagctgcaatgcgccggtgtcactgtttccaaacgcaccctcaaccgcaacggcctccacttgccatcttactcaccttatccccaaatgatcattgtcgttcaaggtgcgtaatattagtaagaagtatttatcagcttaacgtgataacaataatagtaatatgaaatatttattaaatttttataattaatctctgctagaaaatttgattaatca

SEQ ID NO: 6169 - DNA, 642 bp, Artificial
  Mutations within GlyA3B4 introduced by GmGlyA3B4_T03TALE nuclease
gttcatgtacggttgcagatataaacgaagcatagcttatgtatgaggtgtaacaaaattggaaacaatagccatgcaaggtgaagaatgtcaccaactcagaaacccttcttcattgacgtgtccctcactcactctcctctcttcactataaatcgccactcttcgtgttctccacttcaccaactccttcaaacttattaacactttccttagttcaatatggggaagcccttcttcactctctctctttcttccctttgcttgctactcttgtcgagtgcatgctttgctattacctccagcaagtgccaactcaacaacctcaacgcgttggaacccgaccaccgcgttgagtccgaaggtggtcttattgaaacatggaactctcaacaccctgagctgcaatgcgccggtgtcactgtttccaaacgcaccctcaaccgcaacggcctccacttgccatcttactcaccttatccccaaatgatcattgtcgttcaaggtgcgtaatattagtaagaagtatttatcagcttaacgtgataacaatatagtaatatgaaatatttattaaatttttataatttaatctctgctagaaaatttgattaatcattttagtagaatttgttttctcaa

SEQ ID NO: 6170 - DNA, 655 bp, Artificial; identical to SEQ ID NO: 5189
  Mutations within GlyA3B4 introduced by GmGlyA3B4_T03TALE nuclease

SEQ ID NO: 6171 - DNA, 616 bp, Artificial
  Mutations within GlyA3B4 introduced by GmGlyA3B4_T03TALE nuclease
gttcatgtacggttgcagatataaacgaagcatagcttatgtatgaggtgtaacaaaattggaaacaatagccatgcaaggtgaagaatgtcaccaactcagaaacccttcttcattgacgtgtccctcactcactctcctctcttcactataaatcgccactcttcgtgttctccacttcaccaactccttcaaacttattaacactttccttagttcaatatggggaagcccttcttcactctctctctttcttccctttgcttgctactcttgtcgagtgcatgccttgctattacctccagcaagttcaactcaacaacctcaacgcgttggaacccgaccaccgcgttgagtccgaaggtggtcttattgaaacatggaactctcaacaccctgagctgcaatgcgccggtgtcactgtttccaaacgcaccctcaaccgcaacggcctccacttgccatcttactcaccttatccccaaatgatcattgtcgttcaaggtgcgtaatattagtaagaagtatttatcagcttaacgtgataacaatatagtaatatgaaatatttattaaatttttataattaatctctgctagaaaatttgattaatca

SEQ ID NO: 6172 - DNA, 623 bp, Artificial
  Mutations within GlyA3B4 introduced by GmGlyA3B4_T03TALE nuclease
gttcatgtacggttgcagatataaacgaagcatagcttatgtatgaggtgtaacaaaattggaaacaatagccatgcaaggtgaagaatgtcaccaactcagaaacccttcttcattgacgtgtccctcactcactctcctctcttcactataaatcgccactcttcgtgttctccacttcaccaactccttcaaacttattaacactttccttagttcaatatggggaagcccttcttcactctctctctttcttccctttgcttgctactcttgtcgagtgcatgctttgctattacctccagcaagtccaagtgccactcaacaacctcaacgcgttggaacccgaccaccgcgttgagtccgaaggtggtcttattgaaacatggaactctcaacaccctgagctgcaatgcgccggtgtcactgtttccaaacgcaccctcaaccgcaacggcctccacttgccatcttactcaccttatccccaaatgatcattgtcgttcaaggtgcgtaatattagtaagaagtatttatcagcttaacgtgataacaataatagtaatatgaaatatttattaaatttttataattaatctctgctagaaaatttgattaatca

SEQ ID NO: 6173 - DNA, 516 bp, Artificial
  Mutations within GlyA3B4 introduced by GmGlyA3B4_T03TALE nuclease
gttcatgtacggttgcagatataaacgaagcatagcttatgtatgaggtgtaacaaaattggaaacaatagccatgcaaggtgaagaatgtcaccaactcagaaacccttcttcattgacgtgtccctcactcactctcctctcttcactataaatcgccactcttcgtgttctccacttcaccaactccttcaaacttattaacactttccttagttcaatatggggaagcccttcttcactctcttggaacccgaccaccgcgttgagtccgaaggtggtcttattgaaacatggaactctcaacaccctgagctgcaatgcgccggtgtcactgtttccaaacgcaccctcaaccgcaacggcctccacttgccatcttactcaccttatccccaaatgatcattgtcgttcaaggtgcgtaatattagtaagaagtatttatcagcttaacgtgataacaataatagtaatatgaaatatttattaaattttttataattaatctctgctag

SEQ ID NO: 6174 - DNA, 632 bp, Artificial
  Mutations within GlyA3B4 introduced by GmGlyA3B4_T03TALE nuclease
gttcatgtacggttgcagatataaacgaagcatagcttatgtagaggtgtaacaaaattggaaacaatagccatgcaaggtgaagaatgtcaccaactcagaaacccttcttcattgacgtgtccctcactcactctcctctcttcactataaatcgccactcttcgtgttctccacttcaccaactccttcaaacttattaacactttccttagttcaatatggggaagcccttcttcactctctctctttcttccctttgcttgctactcttgtcgagtgcatgctttgctattacctccagcaagtgccaactcaacaacctcaacgcgttggaacccgaccaccgcgttgagtccgaaggtggtcttattgaaacatggaactctcaacaccctgagctgcaatgcgccggtgtcactgtttccaaacgcaccctcaaccgcaacggcctccacttgccatcttactcaccttatccccaaatgatcattgtcgttcaaggtgcgtaatattagtaagaagtatttatcagcttaacgtgataacaataatagtaatatgaaatatttattaaatttttataattaatctctgctagaaaatttgattaatcattttagtagaatttg

SEQ ID NO: 6175 - DNA, 644 bp, Artificial; identical to SEQ ID NO: 4919
  Mutations within GlyA3B4 introduced by GmGlyA3B4_T03TALE nuclease

SEQ ID NO: 6176 - DNA, 645 bp, Artificial
  Mutations within GlyA3B4 introduced by GmGlyA3B4_T03TALE nuclease
gttcatgtacggttgcagatataaacgaagcatagcttatgtatgaggtgtaacaaaattggaaacaatagccatgcaaggtgaagaatgtcaccaactcagaaacccttcttcattgacgtgtccctcactcactctcctctcttcactataaatcgccactcttcgtgttctccacttcaccaactccttcaaacttattaacactttccttagttcaatatggggaagcccttcttcactctctctctttcttccctttgcttgctactcttgtcgagtgcatgctttgctattacctccagcagccaactcaacaacctcaacgcgttggaacccgaccaccgcgttgagtccgaaggtggtcttattgaaacatggaactctcaacaccctgagctgcaatgcgccggtgtcactgtttccaaacgcaccctcaaccgcaacggcctccacttgccatcttactcaccttatccccaaatgatcattgtcgttcaaggtgcgtaatattagtaagaagtatttatcagcttaacgtgataacaataatagtaatatgaaatatttattaaatttttataattaatctctgctagaaaatttgattaatcattttagtagaatttgtttttctcaactagg

SEQ ID NO: 6177 - DNA, 622 bp, Artificial
  Mutations within GlyA3B4 introduced by GmGlyA3B4_T03TALE nuclease
gttcatgtacggttgcagatataaacgaagcatagcttatgtatggaggtgataacaaaattggaaacaatagccaagtgcaaggatgaagaatgtcaccaaacctcagaaacccttcttcattgcacgtgtccctcactcactctcctctcttcaactataaatcgccactcttcgtgttctccacttcaccaactccttcaaacttattaacactttccttagttcaatatggggaagcccttcttcactctctctctttcttccctttgcttgctactcttgtcgagtgcatgctttgctattacctccagcaagttcaacgcgagtgccaactcaacaacctcaacgcgttggaacccgaccaccgcgttgagtccgaaggtggtcttattgaaacatggaactctcaacaccctgagctgcaatgcgccggtgtcactgtttccaaacgcaccctcaaccgcaacggcctccacttgccatcttactcaccttatccccaaatgatcattgtcgttcaaggtgcgtaatattagtaagaagtatttatcagcttaacgtgataacaataatagtaatatgaaatattattaaattttttataattaatctctgctag

SEQ ID NO: 6178 - DNA, 634 bp, Artificial
  Mutations within GlyA3B4 introduced by GmGlyA3B4_T03TALE nuclease
gttcatgtacggttgcagatataaacgaagcatagcttatgtatgaggtgtaacaaaattggaaacaatagccatgcaaggtgaagaatgtcaccaactcagaaacccttcttcattgacgtgtccctcactcactctcctctcttcactataaatcgccactcttcgtgttctccacttcaccaactccttcaaacttattaacactttccttagttcaatatggggaagcccttcttcactctctctctttcttccctttgcttgctactcttgtcgagtgcatgctttgctattacctccagcaacgagtgccaactcaacaacctcaacgcgttggaacccgaccaccgcgttgagtccgaaggtggtcttattgaaacatggaactctcaacaccctgagctgcaatgcgccggtgtcactgtttccaaacgcaccctcaaccgcaacggcctccacttgccatcttactcaccttatccccaaatgatcattgtcgttcaaggtgcgtaatattagtaagagtatttatcagcttaacgtgataacaatatagtaatatgaaatatttattaaatttttataattaatctctgctagaaaatttgattaatcattttagtagaatttg

SEQ ID NO: 6179 - DNA, 651 bp, Artificial
  Mutations within GlyA3B4 introduced by GmGlyA3B4_T03TALE nuclease
gttcatgtacggttgcagatataaacgaagcatagcttatgtatgaggtgtaacaaaattggaaacaatagccatgcaaggtgaagaatgtcaccaactcagaaacccttcttcattgacgtgtccctcactcactctcctctcttcactataaatcgccactcttcgtgttctccacttcaccaactccttcaaacttattaacactttccttagttcaatatggggaagcccttcttcactctctctctttcttccctttgcttgctactcttgtcgagtgcatgctttgctattacctccaacaacctcaacgcgttggaacccgaccaccgcgttgagtccgaaggtggtcttattgaaacatggaactctcaacaccctgagctgcaatgcgccggtgtcactgtttccaaacgcaccctcaaccgcaacggcctccacttgccatcttactcaccttatccccaaatgatcattgtcgttcaaggtgcgtaatattagtaagaagtatttattcagcttaacgtgataacaataatagtaatatgaaatatttattaaattttttataattaatctctgctagaaaatttgattaatcatttttagtagaatttgttttttctcaactaggttttaaacaccaca

SEQ ID NO: 6180 - DNA, 622 bp, Artificial
  Mutations within GlyA3B4 introduced by GmGlyA3B4_T03TALE nuclease
gttcatgtacggttgcagatataaacgaagcatagcttatgtatgaggtgtaacaaaattggaaacaatagccatgcaaggtgaagaatgtcaccaactcagaaacccttcttcattgacgtgtccctcactcactctcctctcttcactataaatcgccactcttcgtgttctccacttcaccaactccttcaaacttattaacactttccttagttcaatatggggaagcccttcttcactctctctctttcttccctttgcttgctactcttgtcgagtgcatgctttgctattacctccagcaagttcatgccaactcaacaacctcaacgcgttggaacccgaccaccgcgttgagtccgaaggtggtcttattgaaacatggaactctcaacaccctgagctgcaatgcgccggtgtcactgtttccaaacgcaccctcaaccgcaacggcctccacttgccatcttactcaccttatccccaaatgatcattgtcgttcaaggtgcgtaatattagtaagaagtatttatcagcttaacgtgataacaataatagtaatatgaaatatttattaaatttttataattaatctctgctagaaaatttgattaatca

SEQ ID NO: 6181 - DNA, 625 bp, Artificial
  Mutations within GlyA3B4 introduced by GmGlyA3B4_T03TALE nuclease
gttcatgtacggttgcagatataaacgaagcatagcttatgtaatgaggtgtaacaaaagttggaaacaatagccatgcaaggtgaagaatgtcaccaactcagaaaccccttcttcattgacgtgtccctcactcactctcctctcttcactataaatcgccactcttcgtgttctccacttcaccaactccttcaaacttattaacactttccttagttcaatatggggaagcccttcttcactctctctctttcttccctttgcttgctactcttgtcgagtgcatgctttgctattacctccagcaagttagtgccaactcaacaacctcaacgcgttggaacccgaccaccgcgttgagtccgaaggtggtcttattgaaacatggaactctcaacaccctgagctgcaatgcgccggtgtcactgtttccaaacgcaccctcaaccgcaacggcctccacttgccatcttactcaccttatccccaaatgatcattgtcgttcaaggtgcgtaatattagtaagaagtatttatcagcttaacgtgataacaataatagtaatatgaaatatttattaaatttttataattaatctctgctagaaaatttgattaatca

SEQ ID NO: 6182 - DNA, 587 bp, Artificial; identical to SEQ ID NO: 3292
  Mutations within GlyA3B4 introduced by GmGlyA3B4_T03TALE nuclease

SEQ ID NO: 6183 - DNA, 645 bp, Artificial; identical to SEQ ID NO: 4887
  Mutations within GlyA3B4 introduced by GmGlyA3B4_T03TALE nuclease

SEQ ID NO: 6184 - DNA, 659 bp, Artificial; identical to SEQ ID NO: 4859
  Mutations within GlyA3B4 introduced by GmGlyA3B4_T03TALE nuclease

SEQ ID NO: 6185 - DNA, 559 bp, Artificial
  Mutations within GlyA3B4 introduced by GmGlyA3B4_T03TALE nuclease
gttcatgtacggttgcagatataaacgaagcatagcttatgtatgaggtgtaacaaaaattggaaacaatagccatgcaaggtgaagaatgtcaccaactcagaaacccttcttcattgacgtgtccctcactcactctcctctcttcactataaatcgccactcttcgtgttctccacttcaccaactccttcaaacttattaacactttccttagttcaatatggggaagcccttcttcactctctctctttcttccctttgcttgctactcttgtcgagtgcatgctttgctattacctccagcaagttcgagtgccaactcaacaacctcaacgcgttggaacccgaccaccgcgttgagtccgaaggtggtcttattgaaacatggaactctcaacaccctgagctgcaatgcgccggtgtcactgtttccaaacgcaccctcaaccgcaacggcctccacttgccatcttactcaccttatccccaaatgatcattgtcgttcaaggtgcgtaatattagtaagagtatttatcagcttaacgtgataacaat

SEQ ID NO: 6186 - DNA, 646 bp, Artificial
  Mutations within GlyA3B4 introduced by GmGlyA3B4_T03TALE nuclease
gttcatgtacggttgcagatataaacgaagcatagcttatgtatgaggtgtaacaaaattggaaacaatagccatgcaaggtgaagaatgtcaccaactcagaaacccttcttcattgacgtgtccctcactcactctcctctcttcactataaatcgccactcttcgtgttctccacttcaccaactccttcaaacttattaacactttccttagttcaatatggggaagcccttcttcactctctctctttcttccctttgcttgctactcttgtcgagtgcatgctttgctattacctccagcaagttgagtgccaactcaacaacctcaacgcgttggaacccgaccaccgcgttgagtccgaaggtggtcttattgaaacatggaactctcaacaccctgagctgcaatgcgccggtgtcactgtttccaaacgcaccctcaaccgcaacggcctccacttgccatcttactcaccttatccccaaatgatcattgtcgttcaaggtgcgtaatattagtaagaagtatttatcagcttaacgtgataacaatatagtaatatgaaatatttattaaatttttataattaatctctgctagaaaatttgattaatcattttagtagaatttgttttctcaa

SEQ ID NO: 6187 - DNA, 601 bp, Artificial
  Mutations within GlyA3B4 introduced by GmGlyA3B4_T03TALE nuclease
gttcatgtacggttgcagatataaacgaagcatagcttatgtatgaggtgtaacaaaaattggaaacaatagccatgcaaggtgaagaatgtcaccaactcagaaacccttcttcattgacgtgtccctcactcactctcctctcttcactataaatcgccactcttcgtgttctccacttcaccaactccttcaaacttattaacactttccttagttcaatatggggaagcccttcttcactctctctctttcttccctttgcttgctactcttgtcgagtgcatgctttgctattacctccagcaagttgccaactcaacaacctcaacgcgttggaacccgaccaccgcgttgagtccgaaggtggtcttattgaaacatggaactctcaacaccctgagctgcaatgcgccggtgtcactgtttccaaacgcaccctcaaccgcaacggcctccacttgccatcttactcaccttatccccaaatgatcattgtcgttcaaggtgcgtaatattagtaagaagtatttatcagcttaacgtgataacaataatagtaatatgaaatatttattaaatttttataattaatctctgc

SEQ ID NO: 6188 - DNA, 638 bp, Artificial; identical to SEQ ID NO: 5119
  Mutations within GlyA3B4 introduced by GmGlyA3B4_T03TALE nuclease

SEQ ID NO: 6189 - DNA, 627 bp, Artificial
  Mutations within GlyA3B4 introduced by GmGlyA3B4_T03TALE nuclease
gttcatgtacggttgcagatataaacgaagcatagcttatgtatgaggtgtaacaaaattggaaacaatagccatgcaaggtgaagaatgtcaccaactcagaaacccttcttcattgacgtgtccctcactcactctcctctcttcactataaatcgccactcttcgtgttctccacttcaccaactccttcaaacttattaacactttccttagttcaatatggggaagcccttcttcactctctctctttcttccctttgcttgctactcttgtcgagtgccaactcaacaacctcaacgcgttggaacccgaccaccgcgttgagtccgaaggtggtcttattgaaacatggaactctcaacaccctgagctgcaatgcgccggtgtcactgtttccaaacgcaccctcaaccgcaacggcctccacttgccatcttactcaccttatccccaaatgatcattgtcgttcaaggtgcgtaatattagtaagaagtatttatcagcttaacgtgataacaataatagtaatatgaaatatttattaattttttataatttaatctctgctagaaaatttgattaatcatttttagtagaatttgtttttctcaactaggttttt

SEQ ID NO: 6190 - DNA, 657 bp, Artificial
  Mutations within GlyA3B4 introduced by GmGlyA3B4_T03TALE nuclease
gttcatgtacggttgcagatataaacgaagcatagcttatgtatgaggtgtaacaaaattggaaacaatagccatgcaaggtgaagaatgtcaccaactcagaaaccccttcttcattgacgtgtccctcactcactctcctctcttcactataaatcgccactcttcgtgttctccacttcaccaaactccttcaaacttattaacactttccttagttcaatatggggaaagcccttcttcactctctctctttcttccctttgcttgctactcttgtcgagtgcatgctttgctattacctccagcaatgccaactcaacaacctcaacgcgttggaaacccgaccaccgcgttgagtccgaaggtggtcttattgaaacatggaactctcaacaccctgagctgcaatgcgccggtgtcactgtttccaaacgcaccctcaaccgcaacggcctccacttgccatcttactcaccttatccccgaaactgatcattgtcgttcaaaggtgcgtaatattagtaagaagtatttatcagcttaacgtgataacaataatagtaatatgaaaatatttattaaaatttttataattaatctctgctagaaaatttgattaatcatttttagtagaatttgtttttctcaactagg

SEQ ID NO: 6191 - DNA, 604 bp, Artificial
  Mutations within GlyA3B4 introduced by GmGlyA3B4_T03TALE nuclease
gttcatgtacggttgcagatataaacgaagcatagcttatgtatgaggtgtaacaaaattggaaacaatagccatgcaaggtgaagaatgtcaccaactcagaaaccccttcttcattgacgtgtccctcactcactctcctctcttcactataaatcgccactcttcgtgttctccacttcaccaactccttcaaacttattaacactttccttagttcaatatgggggaagcccttcttcactctctctctttcttccctttgcttgctactcttgtcgagtgcatgcatggggaacccgaccaccgcgttgagtccgaaggtggtcttattgaaacatggaactctcaacaccctgagctgcaatgcgccggtgtcactgtttccaaacgcaccctcaaccgcaacggcctccacttgccatcttactcaccttatccccaaatgatcattgtcgttcaaggtgcgtaatattagtaagaagtatttatcagcttaacgtgataacaataatagtaatatgaatatttattaattttttataatttaatctctgctagaaaatttgattaatcatttttagtagaatttgtttttctcaac

SEQ ID NO: 6192 - DNA, 624 bp, Artificial
  Mutations within GlyA3B4 introduced by GmGlyA3B4_T03TALE nuclease
gttcatgtacggttgcagatataaacgaagcatagcttatgtatgaggtgtaacaaaaattggaaacaatagccatgcaaggtgaagaatgtcaccaactcagaaacccttcttcattgacgtgtccctcactcactctcctctcttcactataaatcgccactcttcgtgttctccacttcaccaactccttcaaacttattaacactttccttagttcaatatgggggaagcccttcttcactctctctctttcttccctttgcttgctactcttgtcgagtgcatgctttgctattacctccagcaagtcagtgccaactcaacaacctcaacgcgttggaacccgaccaccgcgttgagtccgaaggtggtcttattgaaacatggaactctcaacaccctgagctgcaatgcgccggtgtcactgtttccaaacgcaccctcaaccgcaacggcctccacttgccatcttactcaccttatccccaaatgatcattgtcgttcaaggtgcgtaatattagtaagaagtatttatcagcttaacgtgataacaataatagtaatatgaaatatttattaaatttttataattaatctctgctagaaaatttgattaatca

SEQ ID NO: 6193 - DNA, 650 bp, Artificial
  Mutations within GlyA3B4 introduced by GmGlyA3B4_T03TALE nuclease
gttcatgtacggttgcagatataaacgaagcatagcttatgtatgaggtgtaacaaaattggaaacaatagccatgcaaggtgaagaatgtcaccaactcagaaacccttcttcattgacgtgtccctcactcactctcctctcttcactataaatcgccactcttcgtgttctccacttcaccaactccttcaaacttattaacactttccttagttcaatatggggaagcccttcttcactctctctctttcttccctttgcttgctactcttgtcgagtgcatgctttgccaactcaacaacctcaacgcgttggaacccgaccaccgcgttgagtccgaaggtggtcttattgaaacatggaactctcaacacccctgagctgcaatgcgccggtgtcactgttttccaaacgcaccctcaaccgcaacggcctccacttgccatcttactcaccttatcccccaaatgatcattgtcgttcaaggtgcgtaatattagtaagaagtatttatcagctttaacgtgataacaataatagtaatatgaaatatttattaaattttttataattaatctctgctagaaaatttgattaatcatttttagtagaatttgttttttctcaactaggttttaaacaccaca

SEQ ID NO: 6194 - DNA, 642 bp, Artificial; identical to SEQ ID NO: 5205
  Mutations within GlyA3B4 introduced by GmGlyA3B4_T03TALE nuclease

SEQ ID NO: 6195 - DNA, 622 bp, Artificial; identical to SEQ ID NO: 5263
  Mutations within GlyA3B4 introduced by GmGlyA3B4_T03TALE nuclease

SEQ ID NO: 6196 - DNA, 645 bp, Artificial; identical to SEQ ID NO: 5013
  Mutations within GlyA3B4 introduced by GmGlyA3B4_T03TALE nuclease

SEQ ID NO: 6197 - DNA, 653 bp, Artificial
  Mutations within GlyA3B4 introduced by GmGlyA3B4_T03TALE nuclease
gttcatgtacggttgcagatataaacgaagcatagcttatgtatgaggtgtaacaaaattggaaacaatagccatgcaaggtgaagaatgtcaccaactcagaaacccttcttcattgacgtgtccctcactcactctcctctcttcactataaatcgccactcttcgtgttctccacttcaccaactccttcaaacttattaacactttccttagttcaatatggggaagcccttcttcactctctctctttcttccctttgcttgctactcttgtcgagtgcatgctttgctattacctccagcaagttgccaactcaacaacctcaacgcgttggaacccgaccaccgcgttgagtccgaaggtggtcttattgaaacatggaactctcaacaccctgagctgcaatgcgccggtgtcactgtttccaaacgcaccctcaaccgcaacggcctccacttgccatcttactcaccttatccccaaatgatcattgtcgttcaaggtgcgtaatattagtaagaagtatttatcagcttaacgtgataacaataatagtaatatgaaatatttattaaatttttataattaatctctgctagaaaatttgattaatcattttagtagaatttgttttctcaactaggttttt

SEQ ID NO: 6198 - DNA, 638 bp, Artificial
  Mutations within GlyA3B4 introduced by GmGlyA3B4_T03TALE nuclease
gttcatgtacggttgcagatataaacgaagcatagcttatgtatgaggtgtaacaaaattggaaacaatagccatgcaaggtgaagaatgtcaccaactcagaaacccttcttcattgacgtgtccctcactcactctcctctcttcactataaatcgccactcttcgtgttctccacttcaccaactccttcaaacttattaacactttccttagttcaatatggggaagcccttcttcactctctctctttcttccctttgcttgctactcttgtcgagtgcatgctttgctattacctccagcaagttcaagtgccaactcaacaacctcaacgcgttggaacccgaccaccgcgttgagtccgaaggtggtcttattgaaacatggaactctcaacaccctgagctgcaatgcgccggtgtcactgtttccaaacgcaccctcaaccgcaacggcctccacttgccatcttactcaccttatccccaaatgatcattgtcgttcaaggtgcgtaatattagtaagaagtatttatcagcttaacgtgatacaataatagtaatatgaaatatttattaaatttttataattaatctctgctagaaaatttgattaatcattttagtagaatttg

SEQ ID NO: 6199 - DNA, 548 bp, Artificial
  Mutations within GlyA3B4 introduced by GmGlyA3B4_T03TALE nuclease
gttcatgtacggttgcagatataaacgaagcatagcttatgtatgaggtgtaacaaaattggaaacaatagccatgcaaggtgaagaatgtcaccaactcagaaacccttcttcattgacgtgtccctcactcactctcctctcttcactataaatcgccactcttcgtgttctccacttcaccaactccttcaaacttattaacactttccttagttcaatatggggaagcccttcttcactctctctctttcttccctttgcttgctactcttgtcgagtgcatgctttgctattacctccagcaagttgtgccaactcaacaacctcaacgcgttggaacccgaccaccgcgttgagtccgaaggtggtcttattgaaacatggaactctcaacaccctgagctgcaatgtgccggtgtcactgtttccaaacgccaccctcaaccgcaacggcctccacttgccatcttactcacccttatccccaaatgatcattgtcgttcaaggtgcgtaatattagtaagaagtatttatcagcttaacg

SEQ ID NO: 6200 - DNA, 601 bp, Artificial; identical to SEQ ID NO: 1930
  Mutations within GlyA3B4 introduced by GmGlyA3B4_T03TALE nuclease

SEQ ID NO: 6201 - DNA, 570 bp, Artificial; identical to SEQ ID NO: 5817
  Mutations within GlyA3B4 introduced by GmGlyA3B4_T03TALE nuclease

SEQ ID NO: 6202 - DNA, 480 bp, Artificial
  Mutations within GlyA3B4 introduced by GmGlyA3B4_T03TALE nuclease
gttcatgtacggttgcagatataaacgaagcatagcttatgtatgaggtgtaacaaaattggaaacaatagccatgcaaggtgaagaatgtcaccaactcagaaacccttcttcattgacgtgtccctcactcactctcctctcttcactataaatcgccactcttcgtgttctccacttcaccaactccttcaaacttattaacactttccttagttcaatatggggaagcccttcttcactctctctctttcttccctttgcttgctactcttgtcgagtgcatgctttgctattacctccagcaaacgcaccctcaaccgcaacggcctccacttgccatcttactcaccttatccccaaatgatcattgtcgttcaaggtgcgtaatattagtaagaagtatttatcagcttaacgtgataacaataatagtaatatgaaatatttattaaattttttataattaatctctgctag

SEQ ID NO: 6203 - DNA, 666 bp, Artificial
  Mutations within GlyA3B4 introduced by GmGlyA3B4_T03TALE nuclease
gttcatgtacggttgcagatataaacgaagcatagcttatgtatgaggtgtaacaaaattggaaacaatagccatgcaaggtgaagaatgtcaccaactcagaaacccttcttcattgacgtgtccctcactcactctcctctcttcactataaatcgccactcttcgtgttctccacttcaccaactccttcaaacttattaacactttccttagttcaatatggggaagcccttcttcactctctctctttcttccctttgcttgctactcttgtcgagtgcatgctttgctattacctccagcaagttagtgccaactcaacaacctcaacgcgttggaacccgaccaccgcgttgagtccgaaggtggtcttattgaaacatggaactctcaacaccctgagctgcaatgcgccggtgtcactgtttccaaacgcaccctcaaccgcaacggcctccacttgccatcttactcaccttatccccaaatgatcattgtcgttcaaggtgcgtaatattagtaagaagtatttatcagcttaacgtgataacaatatagtaatatgaaatatttattaaatttttataattaatctctgctagaaaatttgattaatcatttttagtagaatttgtttttctcaactaggtttttaaaacacca

SEQ ID NO: 6204 - DNA, 627 bp, Artificial
  Mutations within GlyA3B4 introduced by GmGlyA3B4_T03TALE nuclease
gttcatgtacggttgcagatataaacgaagcatagcttatgtatgaggtgtaacaaaattggaaacaatagccatgcaaggtgaagaatgtcaccaactcagaaacccttcttcattgacgtgtccctcactcactctcctctcttcactataaatcgccactcttcgtgttctccacttcaccaactccttcaaacttattaacactttccttagttcaatatggggaagcccttcttcactctctctctttcttccctttgcttgctactcttgtcgagtgcatgctttgctattaacgcgttggaacccgaccaccgcgttgagtccgaaggtggtcttattgaaacatggaactctcaacaccctgagctgcaatgcgccggtgtcactgtttccaaacgcaccctcaaccgcaacggcctccacttgccatcttactcaccttatccccaaatgatcattgtcgttcaaggtgcgtaatattagtaagaagtatttatcagcttaacgtgataacaataatagtaatatgaaatatttattaaattttttataattaattctctgctagaaaatttgattaatcatttttagtagaatttgttttttctcaactaggttttt

SEQ ID NO: 6205 - DNA, 739 bp, Artificial
  Mutations within GlyA3B4 introduced by GmGlyA3B4_T03TALE nuclease
gttcatgtacggttgcagatataaacgaagcatagcttatgtatgaggtgtaacaaaattggaaacaatagccatgcaaggtgaagaatgtcaccaactcagaaacccttcttcattgacgtgtccctcactcactctcctctcttcactataaatcgccactcttcgtgttctccacttcaccaactccttcaaacttattaacactttccttagttcaatatggggaagcccttcttcactctctctctttcttccctttgcttgctactcttgtcgagtgcatgctttgctattacctccagcaattcagcttgtgcctcaactcggatttcttctcctccagctcggacttcaccagctgggaacggctgataggatcccccaatcccttttcactgcatccagcgcaggacgcccgccgaggcaggccaaggcgacgagtgccaactcaacaacctcaacgcgttggaacccgaccaccgcgttgagtccgaaggtggtcttattgaaacatggaactctcaacaccctgagctgcaatgcgccggtgtcactgtttccaaacgcaccctcaaccgcaacggcctccacttgccatcttactcaccttatccccaaatgatcattgtcgttcaaggtgcgtaatcattagtaagaagtatttatcagcttaacgtgataacaataatagtaatatgaaatatttattaaaattttttataattaatctctgcta

SEQ ID NO: 6206 - DNA, 659 bp, Artificial
  Mutations within GlyA3B4 introduced by GmGlyA3B4_T03TALE nuclease
gttcatgtacggttgcagatataaacgaagcatagcttatgtatgaggtgtaacaaaattggaaacaatagccatgcaaggtgaagaatgtcaccaactcagaaacccttcttcattgacgtgtccctcactcactctcctctcttcactataaatcgccactcttcgtgttctccacttcaccaactccttcaaacttattaacactttccttagttcaatatggggaagcccttcttcactctctctctttcttccctttgcttgctactcttgtcgagtgcatgctttgctattacctccagcaatgccaactcaacaacctcaacgcgttggaacacgaccaccgcgttgagtccgaaggtggtcttattgaaacatggaactctcaacaccctgagctgcaatgcgccggtgtcactgtttccaaacgcaccctcaaccgcaacggcctccacttgccatcttactcaccttatccccaaatgatcattgtcgttcaaggtgcgtaatattagtaagaagtatttatcagcttaacgtgatacaatatagtaatatgaaatatttattaaatttttataattaatctctgctagaaaatttgattaatcattttagtagaatttgtttttctcaactaggtttttaaaacacca

SEQ ID NO: 6207 - DNA, 763 bp, Artificial
  Mutations within GlyA3B4 introduced by GmGlyA3B4_T03TALE nuclease
  misc_feature (676); (700): n is a or c or t or g
gttcatgtacggttgcagatataaacgaagcatagcttatgtatgaggtgtaacaaaattggaaacaatagccatgcaaggtgaagaatgtcaccaactcagaaacccttcttcattgacgtgtccctcactcactctcctctcttcactataaatcgccactcttcgtgttctccacttcaccaactccttcaaacttattaacactttccttagttcaatatggggaagcccttcttcactctctctctttcttccctttgcttgctactcttgtcgagtgcatgctttgctattacctccagcaagtctccagcggctgttgccaccattattgctggcgatggccaccacctgctggggggtcaagccgtgggcctggcacagcaccggcaacagccgctggaccgagtgccaactcaacaacctcaacgcgttggaacccgaccaccgcgttgagtccgaaggtggtcttattgaaacatggaactctcaacaccctgagctgcaatgcgccggtgtcactgtttccaaacgcaccctcaaccgcaacggcctcacttgccatcttactcaccttatccccaaatgatcattgtcgttcaaggtgcgtaatattagtaagaagtatttatcgcttaacgtgataacaataatagtaatatgaaaatatttnttaaattttttataattaatctcngctagaaaatttgattaatcatttttagtagaatttgtttttctcaactaggtttaaacacca

SEQ ID NO: 6208 - DNA, 645 bp, Artificial
  Mutations within GlyA3B4 introduced by GmGlyA3B4_T03TALE nuclease
gttcatgtacggttgcagatataaacgaagcatagcttatgtatgaggtgtaacaaaaattggaaacaatagccatgcaaggtgaagaatgtcaccaactcagaaacccttcttcattgacgtgtccctcactcactctcctctcttcactataaatcgccactcttcgtgttctccacttcaccaactccttcaaacttattaacactttccttagttcaatatggggaagcccttcttcactctctctctttcttccctttgcttgctactcttgtcgagtgcatgctttgctattacctccagcaagccaactcaacaacctcaacgcgttggaacccgaccaccgcgttgagtccgaaggtggtcttattgaaacatggaactctcaacaccctgagctgcaatgcgccggtgtcactgtttccaaacgcaccctcaaccgcaacggcctccacttgccatcttactcaccttatccccaaatgatcattgtcgttcaaggtgcgtaatattagtaagaagtatttatcagcttaacgtgataacaatatagtaatatgaaatatttattaaatttttataattaatctctgctagaaaatttgattaatcattttagtagaatttgttttctcaactagg

SEQ ID NO: 6209 - DNA, 658 bp, Artificial
  Mutations within GlyA3B4 introduced by GmGlyA3B4_T03TALE nuclease
gttcatgtacggttgcagatataaacgaagcatagcttatgtatgaggtgtaacaaaattggaaacaatagccatgcaaggtgaagaatgtcaccaactcagaaacccttcttcattgacgtgtccctcactcactctcctctcttcactataaatcgccactcttcgtgttctccacttcaccaactccttcaaacttattaacactttccttagttcaatatggggaagcccttcttcactctctctctttcttccctttgcttgctactcttgtcgagtgcatgctttgctattacctccagcaagttgtgccaactcaacaacctcaacgcgttggaacccgaccaccgcgttgagtccgaaggtggtcttattgaaacatggaactctcaacaccctgagctgcaatgcgccggtgtcactgtttccaaacgcaccctcaaccgcaacggcctccacttgccatcttactcaccttatccccaaatgatcattgtcgttcaaggtgcgtaatattagtaagaagtatttatcagcttaacgtgataacaatatagtaatatgaaatatttattaaatttttataattaatctctgctagaaaatttgattaatcattttagtagaatttgttttctcaactaggtttttaaaa

SEQ ID NO: 6210 - DNA, 642 bp, Artificial
  Mutations within GlyA3B4 introduced by GmGlyA3B4_T03TALE nuclease
gttcatgtacggttgcagatataaacgaagcatagcttatgtatgaggtgtaacaaaattggaaacaatagccatgcaaggtgaagaatgtcaccaactcagaaacccttcttcattgacgtgtccctcactcactctcctctcttcactataaatcgccactcttcgtgttctccacttcaccaactccttcaaacttattaacactttccttagttcaatatggggaagcccttcttcactctctctctttcttccctttgcttgctactcttgtcgagtgcatgctttgctattacctccagcaagttcaaactcaacaacctcaacgcgttggaacccgaccaccgcgttgagtccgaaggtggtcttattgaaacatggaactctcaacaccctgagctgcaatgcgccggtgtcactgtttccaaacgcaccctcaaccgcaacggcctccacttgccatcttactcaccttatccccaaatgatcattgtcgttcaaggtgcgtaatattagtaagaagtatttatcagcttaacgtgataacaatatagtaatatgaaatatttattaaatttttataattaatctctgctagaaaatttgattaatcatttttagtagaatttgttttctcaa

SEQ ID NO: 6211 - DNA, 560 bp, Artificial
  Mutations within GlyA3B4 introduced by GmGlyA3B4_T03TALE nuclease
gttcatgtacggttgcagatataaacgaagcatagcttatgtatgaggtgtaacaaaattggaaacaatagccatgcaaggtgaagaatgtcaccaactcagaaacccttcttcattgacgtgtccctcactcactctcctctcttcactataaatcgccactcttcgtgttctccacttcaccaactccttcaaacttattaacactttccttagttcaatatggggaagcccttcttcactctctctctttcttccctttgcttgctactcttgtcgagtgcatgctttgctattacctctcaacaccctgagctgcaatgcgccggtgtcactgtttccaaacgcaccctcaaccgcaacggcctccacttgccatcttactcaccttatccccaaatgatcattgtcgttcaaggtgcgtaatattagtaagaagtatttatcagcttaacgtgataacaataatagtaatatgaaatatttattaaattttttatattaatctctgctagaaaattgattaatcattttagtagaatttgtttttctcaactagg

SEQ ID NO: 6212 - DNA, 636 bp, Artificial
  Mutations within GlyA3B4 introduced by GmGlyA3B4_T03TALE nuclease
gttcatgtacggttgcagatataaacgaagcatagcttatgtatgaggtgtaacaaaattggaaacaatagccatgcaaggtgaagaatgtcaccaactcagaaacccttcttcattgacgtgtccctcactcactctcctctcttcactataaatcgccactcttcgtgttctccacttcaccaactccttcaaacttattaacactttccttagttcaatatggggaagcccttcttcactctctctctttcttccctttgcttgctactcttgtcgagtgcatgctttgctattacctccagcaagttagtgccaactcaacaacctcaacgcgttggaacccgaccaccgcgttgagtccgaaggtggtcttattgaaacatggaactctcaacaccctgagctgcaatgcgccggtgtcactgtttccaaacgcaccctcaaccgcaacggcctccacttgccatcttactcaccttatccccaaatgatcattgtcgttcaaggtgcgtaatattagtaagaagtatttatcagcttaacgtgataacaataatagtaatatgaaatatttattaaatttttataattaatctctgctagaaaatttgattaatcattttagtagaattt

SEQ ID NO: 6213 - DNA, 620 bp, Artificial
  Mutations within GlyA3B4 introduced by GmGlyA3B4_T03TALE nuclease
gttcatgtacggttgcagatataaacgaagcatagcttatgtatgaggtgtaacaaaattggaaacaatagccatgcaaggtgaagaatgtcaccaactcagaaacccttcttcattgacgtgtccctcactcactctcctctcttcactataaatcgccactcttcgtgttctccacttcaccaactccttcaaacttattaacactttccttagttcaatatggggaagcccttcttcactctctctctttcttccctttgcttgctactcttgtcgagtgcatgctttgctattacctccagcaagttgtgccaactcaacaacctcaacgcgttggaacccgaccaccgcgttgagtccgaaggtggtcttattgaaacatggaactctcaacaccctgagctgcaatgcgccggtgtcactgtttccaaacgcaccctcaaccgcaacggcctccacttgccatcttactcaccttatccccaaatgatcattgtcgttcaaggtgcgtaatattagtaagaagtatttatcagcttaacgtgataacaatatagtaatatgaaatatttattaaatttttataattaatctctgctagaaaatttgattaatca

SEQ ID NO: 6214 - DNA, 619 bp, Artificial
  Mutations within GlyA3B4 introduced by GmGlyA3B4_T03TALE nuclease
gttcatgtacggttgcagatataaacgaagcatagcttatgtatgaggtgtaacaaaattggaaacaatagccatgcaaggtgaagaatgtcaccaactcagaaacccttcttcattgacgtgtccctcactcactctcctctcttcactataaatcgccactcttcgtgttctccacttcaccaactccttcaaacttattaacactttccttagttcaatatggggaagcccttcttcactctctctctttcttccctttgcttgctactcttgtcgagtgccaactcaacaacctcaacgcgttggaacccgaccaccgcgttgagtccgaaggtggtcttattgaaacatggaacctctcaacaccctgagctgcaatgcgccggtgtcactgtttccaaaacgcaccctcaaccgcaacggcctccacttgccatcttactcaccttatccccaaaatgatcattgtcttcaaggtgcgtaatattagtcaagaagtatttcatcagcttaacgtgataacaataatagtaatatgaaataatttattaaatttttataattaatctctgctagaaaatttgattaatcaatttttagtagaaatttgtttttc

SEQ ID NO: 6215 - DNA, 664 bp, Artificial; identical to SEQ ID NO: 4996
  Mutations within GlyA3B4 introduced by GmGlyA3B4_T03TALE nuclease

SEQ ID NO: 6216 - DNA, 650 bp, Artificial
  Mutations within GlyA3B4 introduced by GmGlyA3B4_T03TALE nuclease
gttcatgtacggttgcagatataaacgaagcatagcttatgtatgaggtgtaacaaaattggaaacaatagccatgcaaggtgaagaatgtcaccaactcagaaacccttcttcattgacgtgtccctcactcactctcctctcttcactataaatcgccactcttcgtgttctccacttcaccaactccttcaaacttattaacactttccttagttcaatatggggaagcccttcttcactctctctctttcttccctttgcttgctactcttgtcgagtgcatgctttgctattacctccagcagttgcaatgcctactcaaacaacctcaaacgcgttggaaacccgaccaccgcgttgagtccgaaggtggtcttattgaaacatggaactctcaacaccctgagctgcaatgcgccggtgtcactgtttccaaacgcaccctcaaccgcaacggcctccacttgccatcttactcaccttatccccaaatgatcattgtcgttcaaggtgcgtaatattagtaagaagtatttatcagcttaacgtgataacaataatagtaatatgaaatatttattaaatttttataattaatctctgctagaaaatttgattaatcattttagtagaatttgttttctcaa

SEQ ID NO: 6217 - DNA, 383 bp, Artificial
  Mutations within GlyA3B4 introduced by GmGlyA3B4_T03TALE nuclease
gttcatgtacggttgcagatataaacgaagctagcttatgtatgaggtgtaacaaaaattggaaacaatagccatgcaaggtgaagaatgtcaccaactcagaaacccttcttcattgacgtgtccctcactcactctcctctcttcactataaatcgccactcttcgtgttctccacttcaccaactccttcaaacttattaacactttccttagttcaatatggggaagcccttcttcactctctctctttcttccctttgcttgctactcttgtcgagtgcatgctttgctattacctccagcaagttcatgccaactcaacaacctcaacgcgttggaacccgaccaccgcgttgagtccgaaggtggtcttattgaac

SEQ ID NO: 6218 - DNA, 659 bp, Artificial
  Mutations within GlyA3B4 introduced by GmGlyA3B4_T03TALE nuclease
gttcatgtacggttgcagatataaacgaagcatagcttatgtatgaggtgtaacaaaattggaaacaatagccatgcaaggtgaagaatgtcaccaactcagaaaccccttcttcattgacgtgtccctcactcactctcctctcttcactataaatcgccactcttcgtgttctccacttcaccaactccttcaaacttattaacactttccttagttcaatatggggaagcccttcttcactctctctctttcttccctttgcttgctactcttgtcgagtgcatgctttgctattacctccagcaatgccaactcaacaacctcaacgcgttggaacccgaccaccgcgttgagtccgaaggtggtcttattgaaacatggaactctcaacaccctgagctgcaatgcgccggtgtcactgtttccaaacgcaccctcaaccgcaacggcctccacttgccatcttactcaccttatccccaaatgatcattgtcgttcaaggtgcgtaatattagtaagaagtatttatcagcttaacgtgataacaataatagtaatatgaaatatttattaaatttttataattaatctctgctagaaaatttgattaatcattttagtagaatttgttttctcaactaggttttaaacacca

SEQ ID NO: 6219 - DNA, 738 bp, Artificial
  Mutations within GlyA3B4 introduced by GmGlyA3B4_T03TALE nuclease
gttcatgtacggttgcagatataaacgaagcatagcttatgtatgaggtgtaacaaaattggaaacaatagccatgcaggtgaagaatgtcaccaactcagaaaccccttcttcattgacgtgtccctcactcactctcctctcttcactataaatcgccactcttcgtgttctccacttcaccaactccttcaaacttattaacactttccttagttcaatatgggggaagcccttcttcactctctctctttcttccctttgcttgctactcttgtcgagtgcatgctttgctattacctccagcaagttcagcaggcgctggagacggtccagcggctgttgccggtgctgtgccaggcccacggcttgaccccccagcaggtggtggccatcgccagcaataatggtggcaagcaggcgctggagacggtgcaggtgccaactcaacaacctcaacgcgttggaacccgaccaccgcgttgagtccgaaggtggtcttattgaaacatggaactctcaacaccctgagctgcaatgcgccggtgtcactgtttccaaacgcaccctcaaccgcaacggcctccacttgccatcttactcaccttatccccaaatgatcatgtcgtcaaggtgcgtaatcattagtaagaagtatttatcagcttaacgtgataacaataatagtaatatgaaaatatttattaaaattttttataattaatctctgctagaaaa

SEQ ID NO: 6220 - DNA, 646 bp, Artificial
  Mutations within GlyA3B4 introduced by GmGlyA3B4_T03TALE nuclease
gttcatgtacggttgcagatataaacgaagcatagcttatgtatgaggtgtaacaaaattggaaacaatagccatgcaaggtgaagaatgtcaccaactcagaaacccttcttcattgacgtgtccctcactcactctcctctcttcactataaatcgccactcttcgtgttctccacttcaccaactccttcaaacttattaacactttccttagttcaatatggggaagcccttcttcactctctctctttcttccctttgcttgctactcttgtcgagtgcatgctttgctattacctccagcaagtgccaactcaacaacctcaacgcgttggaacccgaccaccgcgttgagtccgaaggtggtcttattgaaacatggaactctcaacaccctgagctgcaatgcgccggtgtcactgtttccaaacgcaccctcaaccgcaacggcctccacttgccatcttactcaccttatccccaaatgatcattgtcgttcaaggtgcgtaatattagtaagaagtatttatcagcttaacgtgataacaataatagtaatatgaaatatttattaaatttttataatttaatctctgctagaaaatttgattaatcatttttagtagaatttgtttttctcaac

SEQ ID NO: 6221 - DNA, 654 bp, Artificial
  Mutations within GlyA3B4 introduced by GmGlyA3B4_T03TALE nuclease
gttcatgtacggttgcagatataaacgaagcatagcttatgtatgaggtgtaacaaaattggaaacaatagccatgcaaggtgaagaatgtcaccaactcagaaacccttcttcattgacgtgtccctcactcactctcctctcttcactataaatcgccactcttcgtgttctccacttcaccaactccttcaaacttattaacactttccttagttcaatatggggaagcccttcttcactctctctctttcttccctttgcttgctactcttgtcgagtgcatgctttgctattacctccagcaaactcaacaacctcaacgcgttggaacccgaccaccgcgttgagtccgaaggtggtcttattgaaacatggaactctcaacaccctgagctgcaatgcgccggtgtcactgtttccaaacgcaccctcaaccgcaacggcctccacttgccatcttactcaccttatccccaaatgatcattgtcgttcaaggtgcgtaatattagtaagaagtatttatcagcttaacgtgataacaataatagtaatatgaaatatttattaaatttttataattaatctctgctagaaaatttgattaatcattttagtagaatttgttttctcaactaggttttaaaacacca

SEQ ID NO: 6222 - DNA, 668 bp, Artificial
  Mutations within GlyA3B4 introduced by GmGlyA3B4_T03TALE nuclease
gttcatgtacggttgcagatataaacgaagcatagcttatgtatgaggtgtaacaaaaattggaaacaatagccatgcaaaggtgaagaatgtcaccaactcagaaacccttcttcattgacgtgtccctcactcactctcctctcttcactataaatcgccactcttcgtgttctccacttcaccaactccttcaaacttattaacactttccttagttcaatatggggaagcccttcttcactctctctctttcttccctttgcttgctactcttgtcgagtgcatgctttgctattacctccagcaagttcagtgccaactcaacaacctcaacgcgttggaacccgaccaccgcgttgagtccgaaggtggtcttattgaaacatggaactctcaacaccctgagctgcaatgcgccggtgtcactgtttccaaacgcaccctcaaccgcaacggcctccacttgccatcttactcaccttatccccaaatgatcattgtcgttcaaggtgcgtaatattagtaagaagtatttatcagcttaacgtgataacaataatagtaatatgaaatatttattaaatttttataattaatctctgctagaaaatttgattaatcattttagtagaatttgtttttctcaactaggttttaaaacacca

SEQ ID NO: 6223 - DNA, 663 bp, Artificial
  Mutations within GlyA3B4 introduced by GmGlyA3B4_T03TALE nuclease
  misc_feature (530): n is a or c or t or g
gttcatgtacggttgcagatataaacgaagcatagcttatgtatgaggtgtaacaaaattggaaacaatagccatgcaaggtgaagaatgtcaccaactcagaaacccttcttcattgacgtgtccctcactcactctcctctcttcactataaatcgccactcttcgtgttctccacttcaccaactccttcaaacttattaacactttccttagttcaatatgggggaagcccttcttcactctctctctttcttccctttgcttgctactcttgtcgagtgcatgctttgctattacctccagcaacgagtgccaactcaacaacctcaacgcgttggaacccgaccaccgcgttgagtccgaaggtggtcttattgaaacatggaactctcaacaccctgagctgcaatgcgccggtgtcactgtttccaaacgcaccctcaaccgcaacggcctccacttgccatcttactcaccttatccccaaatgatcattgtcgttcaaggtgcgtaatattagtaagagnatttatcagcttaacgtgataacaatatagtaatatgaaatatttattaaatttttataattaatctctgctagaaaatttgattaatcattttagtagaatttgtttttctcaactaggtttttaaacacca

SEQ ID NO: 6224 - DNA, 647 bp, Artificial
  Mutations within GlyA3B4 introduced by GmGlyA3B4_T03TALE nuclease
gttcatgtacggttgcagatataaacgaagcatagcttatgtatgaggtgtaacaaaattggaaacaatagccatgcaaggtgaagaatgtcaccaactcagaaacccttcttcattgacgtgtccctcactcactctcctctcttcactataaatcgccactcttcgtgttctccacttcaccaactccttcaaacttattaacactttccttagttcaatatggggaagcccttcttcactctctctctttcttccctttgcttgctactcttgtcgagtgcatgctttgctattacctccagcaaagagtgccaactcaacaacctcaacgcgttggaacccgaccaccgcgttgagtccgaaggtggtcttattgaaacatggaactctcaacaccctgagctgcaatgcgccggtgtcactgtttccaaacgcaccctcaaccgcaacggcctccacttgccatcttactcaccttatccccaaatgatcattgtcgttcaaggtgcgtaatattagtaagaagtatttatcagcttaacgtgataacaataatagtaatatgaaatatttattaaatttttataattaatctctgctagaaaatttgattaatcatttttagtagaatttgtttttctcaa

SEQ ID NO: 6225 - DNA, 660 bp, Artificial
  Mutations within GlyA3B4 introduced by GmGlyA3B4_T03TALE nuclease
gttcatgtacggttgcagatataaacgaagcatagcttatgtatgaggtgtaacaaaattggaaacaatagccatgcaaggtgaagaatgtcaccaactcagaaacccttcttcattgacgtgtccctcactcactctcctctcttcactataaatcgccactcttcgtgttctccacttcaccaactccttcaaacttattaacactttccttagttcaatatggggaagcccttcttcactctctctctttcttccctttgcttgctactcttgtcgagtgcatgctttgctattacctccagcaagttcatgccaactcaacaacctcaacgcgttggaacccgaccaccgcgttgagtccgaaggtggtcttattgaaacatggaactctcaacaccctgagctgcaatgcgccggtgtcactgtttccaaacgcaccctcaaccgcaacggcctccacttgccatcttactcaccttatccccaaatgatcattgtcgttcaaggtgcgtaatattagtaagaagtatttatcagcttaacgtgataacaataatagtaatatgaaatatttattaaatttttataatttaatctctgctagaaaatttgattaatcattttagtagaatttgttttctcaactaggttttaaaa

SEQ ID NO: 6226 - DNA, 662 bp, Artificial; identical to SEQ ID NO: 5534
  Mutations within GlyA3B4 introduced by GmGlyA3B4_T03TALE nuclease

SEQ ID NO: 6227 - DNA, 645 bp, Artificial; identical to SEQ ID NO: 5013
  Mutations within GlyA3B4 introduced by GmGlyA3B4_T03TALE nuclease

SEQ ID NO: 6228 - DNA, 653 bp, Artificial
  Mutations within GlyA3B4 introduced by GmGlyA3B4_T03TALE nuclease
gttcatgtacggttgcagatataaacgaagcatagcttatgtatgaggtgtaacaaaattggaaacaatagccatgcaaggtgaagaatgtcaccaactcagaaacccttcttcattgacgtgtccctcactcactctcctctcttcactataaatcgccactcttcgtgttctccacttcaccaactccttcaaacttattaacactttccttagttcaatatggggaagcccttcttcactctctctctttcttccctttgcttgctactcttgtcgagtgcatgctttgctattacctccagcagtgccaactcaacaacctcaacgcgttggaacccgaccaccgcgttgagtccgaaggtggtcttattgaacatggaactctcaacaccctgagctgcaatgcgccggtgtcactgtttccaaacgcaccctcaaccgcaacggcctccacttgccatcttactcaccttatccccaaatgatcattgtcgttcaaggtgcgtaatattagtaagaagtatttatcagcttaacgtgataacaataatagtaatatgaaatatttattaaatttttataattaatctctgctagaaaatttgattaatcattttagtagaatttgttttctcaactaggttttaaaa

SEQ ID NO: 6229 - DNA, 727 bp, Artificial
  Mutations within GlyA3B4 introduced by GmGlyA3B4_T03TALE nuclease
gttcatgtacggttgcagatataaacgaagcatagcttatgtatgaggtgtaacaaaattggaaacaatagccatgcaaggtgaagaatgtcaccaactcagaaacccttcttcattgacgtgtccctcactcactctcctctcttcactataaatcgccactcttcgtgttctccacttcaccaactccttcaaacttattaacactttccttagttcaatatggggaagcccttcttcactctctctctttcttccctttgcttgctactcttgtcgagtgcatgctttgctattacctccagcaagccgctggaccgtctccagcgcctgcttgccaccgccattgctggcgatggccaccacctgctggggggtcaacgagtgccaactcaacaacctcaacgcgttggaacccgaccaccgcgttgagtccgaaggtggtcttattgaaacatggaactctcaacaccctgagctgcaatgcgccggtgtcactgtttccaaacgcaccctcaaccgcaacggcctccacttgccatcttactcaccttatccccaaatgatcattgtcgttcaaggtgcgtaatattagtaagaagtatttatcagcttaacgtgataacaataatagtaatatgaaatatttattaaattttttataattaatctctgctagaaaaatttgattaatcatttttagtagaatttgtttttctcaactagg

SEQ ID NO: 6230 - DNA, 464 bp, Artificial
  Mutations within GlyA3B4 introduced by GmGlyA3B4_T03TALE nuclease
gttcatgtacggttgcagatataaacgaagcatagcttatgtatgaggtgtaaacaaaaattggaaacaatagccatgcaaggtgaagaatgtcaccaactcagaaaaccccttcttcattgacgtgtccctcactcactctcctctcttcactataaaatcgccactcttcgtgttctccacttcaccaactccttcaaacttattaacactttccttagttcaatatggggaagcccttcttcactctctctctttcttccctttgcttgctactcttgtcgagtgcatgctttgctattacctccagcaagtgccaactcaacaacctcaacgcgttggaaacccgaccaccgcgttgagtccgaaggtggtcttattgaaacatggaactctcaacaccctgagctgcaatgcgccggtgtcactgtttccaaaacgcaccctcaaccgcaacggcctcc

SEQ ID NO: 6231 - DNA, 663 bp, Artificial
  Mutations within GlyA3B4 introduced by GmGlyA3B4_T03TALE nuclease
gttcatgtacggttgcagatataaacgaagcatagcttatgtatgaggtgtaacaaaattggaaacaatagccatgcaaggtgaagaatgtcaccaactcagaaacccttcttcattgacgtgtccctcactcactctcctctcttcactataaatcgccactcttcgtgttctccacttcaccaactccttcaaacttattaacactttccttagttcaatatggggaagcccttcttcactctctctctttcttccctttgcttgctactcttgtcgagtgcatgctttgctattacctccagcaagttcaagtgccaactcaacaacctcaacgcgttggaaacccgaccaccgcgttgagtccgaaggtggtcttattgaaacatggaactctcaacaccctgagctgcaatgcgccggtgtcactgtttccaaacgcaccctcaaccgcaacggcctccacttgccatcttactcaccttatccccaaatgatcattgtcgttcaaaggtgcgtaatattagtaagaagtatttatcagcttaacgtgataacaataatagtaatatgaaatatttattaaatttttataattaatctctgctagaaaatttgattaatcattttagtagaatttgttttctcaactaggttttaaaa

SEQ ID NO: 6232 - DNA, 656 bp, Artificial
  Mutations within GlyA3B4 introduced by GmGlyA3B4_T03TALE nuclease
gttcatgtacggttgcagatataaacgaagcatagcttatgtatgaggtgtaacaaaaattggaaacaatagccatgcaaggtgaagaatgtcaccaactcagaaacccttcttcattgacgtgtccctcactcactctcctctcttcactataaatcgccactcttcgtgttctccacttcaccaactccttcaaacttattaacactttccttagttcaatatggggaagcccttcttcactctctctctttcttccctttgcttgctactcttgtcgagtgcatgctttgctattacctccagcaacaactcaacaacctcaacgcgttggaacccgaccaccgcgttgagtccgaaggtggtcttattgaacatggaactctcaacaccctgagctgcaatgcgccggtgtcactgtttccaacgcaccctcaaccgcaacggcctccacttgccatcttactcaccttatccccaaatgatcattgtcgttcaaggtgcgtaatattagtaagaagtatttatcagcttaacgtgataacaatatagtaatatgaaatatttattaaatttttataattaatctctgctagaaaatttgattaatcattttagtagaatttgtttttctcaactaggtttttaaaacacca

SEQ ID NO: 6233 - DNA, 643 bp, Artificial; identical to SEQ ID NO: 4829
  Mutations within GlyA3B4 introduced by GmGlyA3B4_T03TALE nuclease

SEQ ID NO: 6234 - DNA, 662 bp, Artificial; identical to SEQ ID NO: 5736
  Mutations within GlyA3B4 introduced by GmGlyA3B4_T03TALE nuclease

SEQ ID NO: 6235 - DNA, 562 bp, Artificial
  Mutations within GlyA3B4 introduced by GmGlyA3B4_T03TALE nuclease
gttcatgtacggttgcagatataaaccgaagcatagcttatgtatgaggtgtaacaaaattggaaacaatagccatgcaaggtgaagaatgtcaccaactcagaaacccttcttcattgacgtgtccctcactcactctcctctcttcactataaatcgccactcttcgtgttctccacttcaccaactccttcaaacttattaacactttccttagttcaatatggggaagcccttcttcactctctctctttcttccctttgcttgctactcttgtcgagtgcatgctttgctattacctccagcaagtagtgccaactcaacaacctcaacgcgttggaaccgaccaccgcgttgagtccgaaggtggtcttattgaaatcatggaactctcaacacctgagctgcaatgcgccggtgtcactgtttccaaaacgcaccctcaaccgcaacggcctccaaccttgccatcttaactcaccttatccccaaactgaatcattgtcgttcaaggtgcgtaatattagtaagaagtatttatcagcttaacgtgataacaat

SEQ ID NO: 6236 - DNA, 581 bp, Artificial
  Mutations within GlyA3B4 introduced by GmGlyA3B4_T03TALE nuclease
gttcatgtacggttgcagatataaacgaagcatagcttatgtatgaggtgtaacaaaattggaaacaatagccatgcaaggtgaagaatgtcaccaactcagaaacccttcttcattgacgtgtccctcactcactctcctctcttcactataaatcgccactcttcgtgttctccacttcaccaactccttcaaacttattaacactttccttagttcaatatggggaagcccttcttcactctctctctttcaacaacctcaacgcgttggaacccgaccaccgcgttgagtccgaaggtggtcttattgaaacatggaactctcaacaccctgagctgcaatgcgccggtgtcactgtttccaaacgcaccctcaaccgcaacggcctccacttgccatcttactcaccttatccccaaatgatcattgtcgttcaaggtgcgtaatattagtaagaagtatttatcagcttaacgtgataacaataatagtaatatgaaatatttattaaattttttataattaatctctgctagaaaatttgattaatcatttttagtagaatttgtttttctcaa

SEQ ID NO: 6237 - DNA, 380 bp, Artificial
  Mutations within GlyA3B4 introduced by GmGlyA3B4_T03TALE nuclease
gttcatgtacggttgcagatataaacgaagcatagcttatgtatgaggtgtaacaaaaattggaaacaatagccatgcaaggtgaagaatgtcaccaactcagaaaccccttcttcattgacgtgtccctcactcactctcctctcttcactataaatcgccactcttcgtgttctccacttcaccaactccttcaaacttattaacactttccttagttcaatatggggaagcccttcttcactctctctctttcttccctttgcttgctactcttgtcgagtgcatgctttgctattacctccagcaagtgccaactcaacaacctcaacgcgttggaacccgaccacctgcgttgagtcccgaaggtggtcttattg

SEQ ID NO: 6238 - DNA, 668 bp, Artificial
  Mutations within GlyA3B4 introduced by GmGlyA3B4_T03TALE nuclease
gttcatgtacggttgcagatataaacgaagcatagcttatgtatgaggtgtaacaaaattggaaacaatagccatgcaaggtgaagaatgtcaccaactcagaaacccttcttcattgacgtgtccctcactcactctcctctcttcactataaatcgccactcttcgtgttctccacttcaccaactccttcaaacttattaacactttccttagttcaatatggggaagcccttcttcactctctctctttcttccctttgcttgctactcttgtcgagtgcatgcttttgctattacctccagcaagttcaatgccaactcaacaacctcaacgcgttggaacccgaccaccgcgttgagtccgaaggtggtcttattgaaacatggaactctcaacaccctgagctgcaatgcgccggtgtcactgtttccaaacgcaccctcaaccgcaacggcctccacttgccaatcttactcaccttatcccccaaatgatcattgtcgttcaaggtgcgtaatattagtaagaagtatttatcagcttaacgtgatacaatatagtaatatgaaatatttattaaatttttataattaatctctgctagaaaatttgattaatcattttagtagaatttgttttctcaactaggtttttaaaatcacca

SEQ ID NO: 6239 - DNA, 606 bp, Artificial
  Mutations within GlyA3B4 introduced by GmGlyA3B4_T03TALE nuclease
gttcatgtacggttgcagatataaacgaagcatagcttatgtatgaggtgtaacaaaaattggaaacaatagccatgcaaggtgaagaatgtcaccaactcagaaacccttcttcattgacgtgtccctcactcactctcctctcttcactataaatcgccactcttcgtgttctccacttcaccaactccttcaaacttattaacactttccttagttcaatatggggaagcccttcttcactctctctctttcttccctttgcttgctactcttgtcgagtgcatgctttgctattacctccagcaagtagtgccaactcaacaacctcaacgcgttggaacccgaccaccgcgttgagtccgaaggtggtcttattgaaacatggaactctcaacaccctgagctgcaatgcgccggtgtcactgtttccaaatgcaccctcaaccgcaacggcctccacttgccatcttactcaccttatccccaaatgatcattgtcgttcaaggtgcgtaatattagtaagaagtatttatcagcttaacgtgataacaatatagtaatatgaaatatttattaaatttttataatttaatctctgctag

SEQ ID NO: 6240 - DNA, 651 bp, Artificial
  Mutations within GlyA3B4 introduced by GmGlyA3B4_T03TALE nuclease
gttcatgtacggttgcagatataaacgaagcatagcttatgtatgaggtgtaacaaaattggaaacaatagccatgcaaggtgaagaatgtcaccaactcagaaacccttcttcatcagcgtgtccctcactcactctcctctcttcactataaatcgccactcttcgtgttctccacttcaccaactccttcaaacttattaacactttccttagttcaatatggggaagcccttcttcactctctctctttcttccctttgcttgctactcttgtcgagtgcatgctttgctattacctccagcaaccaactcaacaacctcaacgcgttggaacccgaccaccgcgttgagtccgaaggtggtcttattgaaacatggaactctcaacaccctgagctgcaatgcgccggtgtcactgtttccaaacgcaccctcaaccgcaacggcctccacttgccatcttactcaccttatccccaaatgatcattgtcgttcaaggtgcgtaatcattagtaagaagtatttatcagcttaacgtgatacaatatagtaatatgaaatatttattaaatttttataattaatctctgctagaaaatttgattaatcattttagtagaatttgttttctcaactaggttttaaaa

SEQ ID NO: 6241 - DNA, 645 bp, Artificial
  Mutations within GlyA3B4 introduced by GmGlyA3B4_T03TALE nuclease
  misc_feature (141): n is a or c or t or g
gttcatgtacggttgcagatataaacgaagcatagcttatgtatgaggtgtaacaaaattggaaacaatagccatgcaaggtgaagaatgtcaccaactcagaaacccttcttcattgacgtgtccctcactcactctccnctcttcactataaatcgccactcttcgtgttctccacttcaccaactccttcaaacttattaacactttccttagttcaatatggggaagcccttcttcactctctctctttcttccctttgcttgctactcttgtcgagtgcatgctttgctattacctccagtaagtcaacaacctcaacgcgttggaacccgaccaccgcgttgagtccgaaggtggtcttattgaaacatggaactctcaacaccctgagctgcaatgcgcccggtgtcactgtttccaaacgcaccctcaaccgcaacggcctccacttgccatcttactcaccttatccccaaatgatcattgtcgttcaaggtgcgtaatattagtaagaagtatttatcagctttaacgtgataacaataatagtaatatgaaatatttattaaattttttataattaatctctgctagaaaatttgattaatctttttagtagaatttgttttttctcaactagg

SEQ ID NO: 6242 - DNA, 620 bp, Artificial; identical to SEQ ID NO: 5246
  Mutations within GlyA3B4 introduced by GmGlyA3B4_T03TALE nuclease

SEQ ID NO: 6243 - DNA, 666 bp, Artificial
  Mutations within GlyA3B4 introduced by GmGlyA3B4_T03TALE nuclease
gttcatgtacggttgcagatataaacgaagcatagcttatgtatgaggtgtaacaaaattggaaacaatagccatgcaaggtgaagaatgtcaccaactcagaaacccttcttcattgacgtgtccctcactcactctcctctcttcactataaatcgccactcttcgtgttctccacttcaccaactccttcaaacttattaacactttccttagttcaatatggggaagcccttcttcactctctctctttcttccctttgcttgctactcttgtcgagtgcatgctttgctattacctccagcaagttcagtgccaactcaacaacctcaacgcgttggaacccgaccaccgcgttgagtccgaaggtggtcttattgaaacatggaactctcaacaccctgagctgcaatgcgccggtgtcactgtttccaaacgcaccctcaaccgcaacggcctccacttgccatcttactcaccttatccccaaatgatcattgtcgttcaaggtgcgtaatattagtaagaagtatttatcagcttaacgtgataacaatatagtaatatgaaatatttattaaatttttataattaatctctgctagaaaatttgattaatcattttagtagaatttgtttttctcaactaggtttttaaaacacca

SEQ ID NO: 6244 - DNA, 656 bp, Artificial; identical to SEQ ID NO: 5475
  Mutations within GlyA3B4 introduced by GmGlyA3B4_T03TALE nuclease

SEQ ID NO: 6245 - DNA, 666 bp, Artificial; identical to SEQ ID NO: 4986
  Mutations within GlyA3B4 introduced by GmGlyA3B4_T03TALE nuclease

SEQ ID NO: 6246 - DNA, 550 bp, Artificial
  Mutations within GlyA3B4 introduced by GmGlyA3B4_T03TALE nuclease
gttcatgtacggttgcagatataaacgaagcatagcttatgtatgaggtgtaacaaaattggaaacaatagccatgcaaggtgaagaatgtcaccaactcagaaaccccttcttcattgacgtgtccctcactcactctcctctcttcactataaatcgccactcttcgtgttctccacttcaccaactccttcaaacttattaacactttccttagttcaatatgagtaagttggaacccgaccaccgcgttgagtccgaaggtggtcttattgaaacatggaactctcaacaccctgagctgcaatgcgccggtgtcactgtttccaaacgcaccctcaaccgcaacggcctccacttgccatcttactcaccttatcccccaaatgatcattgtcgttcaaggtgcgtaatattagtaagaagtatttatcagcttaacgtgataacaataatagtaatatgaaatatttattaaattttttataattaatctctgctagaaaatttgattaatcatttttagtagaatttgtttttctcaactagg

SEQ ID NO: 6247 - DNA, 647 bp, Artificial
  Mutations within GlyA3B4 introduced by GmGlyA3B4_T03TALE nuclease
gttcatgtacggttgcagatataaacgaagcatagcttatgtatgaggtgtaacaaaattggaaacaatagccatgcaaggtgaagaatgtcaccaactcagaaacccttcttcattgacgtgtccctcactcactctcctctcttcactataaatcgccactcttcgtgttctccacttcaccaactccttcaaacttattaacactttccttagttcaatatggggaagcccttcttcactctctctctttcttccctttgcttgctactcttgtcgagtgcatgctttgctattacctccagcaagttgccaactcaacaacctcaacgcgttggaacccgaccaccgcgttgagtccgaaggtggtcttattgaaacatggaactctcaacaccctgagctgcaatgcgccggtgtcactgtttccaaacgcaccctcaccgcaacggcctccacttgccatcttactcaccttatccccaaatgatcattgtcgttcaaggtgcgtaatattagtaagaagtatttatcagcttaacgtgataacaataatagtaatatgaaatatttattaaatttttataattaatctctgctagaaaatttgattaatcattttagtagaatttgttttctcaactagg

SEQ ID NO: 6248 - DNA, 630 bp, Artificial
  Mutations within GlyA3B4 introduced by GmGlyA3B4_T03TALE nuclease
gttcatgtacggttgcagatataaacgaagcatagcttatgtatgaggtgtaacaaaattggaaacaatagccatgcaaggtgaagaatgtcaccaactcagaaacccttcttcattgacgtgtccctcactcactctcctctcttcactataaatcgccactcttcgtgttctccacttcaccaactccttcaaacttattaacactttccttagttcaatatggggaagcccttcttcactctctctctttcttccctttgcttgctactcttgtcgagtgcatgctttgctattacctccagcaaccaactcaacaacctcaacgcgttggaacccgaccaccgcgttgagtccgaaggtggtcttattgaaacatggaactctcaacaccctgagctgcaatgcgccggtgtcactgtttccaaacgcaccctcaaccgcaacggcctccacttgccatcttactcaccttatccccaaatgatcattgtcgttcaaggtgcgtaatattagtaagaagtatttatcagcttaacgtgataacaataatagtaatatgaaatatttattaaatttttataattaatctctgctagaaaatttgattaatcattttagtagaatttg

SEQ ID NO: 6249 - DNA, 663 bp, Artificial
  Mutations within GlyA3B4 introduced by GmGlyA3B4_T03TALE nuclease
gttcatgtacggttgcagatataaacgaagcatagcttatgtatgaggtgtaacaaaattggaaacaatagccatgcaaggtgaagaatgtcaccaactcagaaacccttcttcattgacgtgtccctcactcactctcctctcttcactataaatcgccactcttcgtgttctccacttcaccaactccttcaaacttattaacactttccttagttcaatatggggaagcccttcttcactctctctctttcttccctttgcttgctactcttgtcgagtgcatgctttgctattacctccagcaagttcaagtgccaactcaacaacctcaacgcgttggaacccgaccaccgcgttgagtccgaaggtggtcttattgaaacatggaactctcaacaccctgagctgcaatgcgccggtgtcactgtttccaaacgcaccctcaaccgcaacggcctccacttgccatcttactcaccttatccccaaatgatcattgtcgttcaaggtgcgtaatattagtaagaagtatttatcagcttaacgtgataacaataatagtaatatgaaatatttattaaatttttataatttaatctctgctagaaaatttgattaatcattttagtagaatttgtttttctcaactaggttttaaaa

SEQ ID NO: 6250 - DNA, 621 bp, Artificial; identical to SEQ ID NO: 5770
  Mutations within GlyA3B4 introduced by GmGlyA3B4_T03TALE nuclease

SEQ ID NO: 6251 - DNA, 622 bp, Artificial; identical to SEQ ID NO: 5263
  Mutations within GlyA3B4 introduced by GmGlyA3B4_T03TALE nuclease

SEQ ID NO: 6252 - DNA, 636 bp, Artificial; identical to SEQ ID NO: 5104
  Mutations within GlyA3B4 introduced by GmGlyA3B4_T03TALE nuclease

SEQ ID NO: 6253 - DNA, 640 bp, Artificial; identical to SEQ ID NO: 5221
  Mutations within GlyA3B4 introduced by GmGlyA3B4_T03TALE nuclease

SEQ ID NO: 6254 - DNA, 638 bp, Artificial
  Mutations within GlyA3B4 introduced by GmGlyA3B4_T03TALE nuclease
gttcatgtacggttgcagatataaacgaagcatagcttatgtatgaggtgtaacaaaattggaaacaatagccatgcaaggtgaagaatgtcaccaactcagaaacccttcttcattgacgtgtccctcactcactctcctctcttcactataaatcgccactcttcgtgttctccacttcaccaactccttcaaacttattaacactttccttagttcaatatggggaagcccttcttcactctctctctttcttccctttgcttgctactcttgtcgagtgcatgctttgctattacctccagcaatcaacaacctcaacgcgttggaacccgaccaccgcgttgagtccgaaggtggtcttattgaaacatggaactctcaacaccctgagctgcaatgcgccggtgtcactgtttccaaacgcaccctcaaccgcaacggcctccacttgccatcttactcaccttatcccccaaatgatcattgtcgttcaaggtgcgtaatattagtaagaagtatttatcagcttaacgtgataacaataatagtaatatgaaatatttattaaattttttataattaatctctgctagaaaatttgattacatttttagtagaattttgtttttctcaac

SEQ ID NO: 6255 - DNA, 556 bp, Artificial; identical to SEQ ID NO: 5054
  Mutations within GlyA3B4 introduced by GmGlyA3B4_T03TALE nuclease

SEQ ID NO: 6256 - DNA, 669 bp, Artificial
  Mutations within GlyA3B4 introduced by GmGlyA3B4_T03TALE nuclease
  misc_feature (544): n is a or c or t or g
gttcatgtacggttgcagatataaacgaagcatagcttatgtatgaggtgtaacaaaattggaaacaatagccatgcaaggtgaagaatgtcaccaactcagaaaccccttcttcattgacgtgtccctcactcactctcctctcttcactataaatcgccactcttcgtgttctccacttcaccaactccttcaaacttattaacactttccttagttcaatatggggaagcccttcttcactctctctctttcttccctttgcttgctactcttgtcgagtgcatgctttgctattacctccagcaagttcaacgctagctacatcaacctcaacctcagcgcgtttgggaaaccccgaccaccgcgttgagtccgaaggtggtcttattgaaacatggaactctcaacaccctgagctgcaatgcgccggtgtcactgtttccaaacgcaccctcaaccgcaacggcctccacttgccatcttactcaccttatccccaaaatgatcattgtcgttcaaggtgcgtaatattagtaagagnatttatcagcttaacgtgataacaatatagtaatatgaaatatttattaaatttttataattaatctctgctagaaaatttgattaatcattttagtagaatttgtttttctcaactaggttttt

SEQ ID NO: 6257 - DNA, 622 bp, Artificial
  Mutations within GlyA3B4 introduced by GmGlyA3B4_T03TALE nuclease
  misc_feature (532): n is a or c or t or g
gttcatgtacggttgcagatataaacgaagcatagcttatgtatgaggtgtaacaaaattggaaacaatagccatgcaaggtgaagaatgtcaccaactcagaaacccttcttcattgacgtgtccctcactcactctcctctcttcactataaatcgccactcttcgtgttctccacttcaccaactccttcaaacttattaacactttccttagttcaatatggggaagcccttcttcactctctctctttcttccctttgcttgctactcttgtcgagtgcatgctttgctattacctccagcaagttcgagtgccaactcaacaacctcaacgcgttggaacccgaccaccgcgttgagtccgaaggtggtcttattgaaacatggaactctcaacaccctgagctgcaatgcgccggtgtcactgtttccaaacgcaccctcaaccgcaacggcctccacttgccatcttactcaccttatccccaaatgatcattgtcgttcaaggtgcgtaatattagtaagagnatttatcagcttaacgtgataacaatatagtaatatgaaatatttattaaatttttataattaatctctgctagaaaatttgattaatca

SEQ ID NO: 6258 - DNA, 646 bp, Artificial
  Mutations within GlyA3B4 introduced by GmGlyA3B4_T03TALE nuclease
gttcatgtacggttgcagatataaacgaagcatagcttatgtatgaggtgtaacaaaattggaaacaatagccatgcaaggtgaagaatgtcaccaactcagaaacccttcttcattgacgtgtccctcactcactctcctctcttcactataaatcgccactcttcgtgttctccacttcaccaactccttcaaacttattaacactttccttagttcaatatggggaagcccttcttcactctctctctttcttccctttgcttgctactcttgtcgagtgcatgctttgccaactcaacaacctcaacgcgttggaacccgaccaccgcgttgagtccgaaggtggtcttattgaaacatggaactctcaacacccctgagctgcaatgcgccggtgtcactgtttccaaacgcaccctcaaccgcaacggcctccacttgccatcttactcaccttatccccaaatgatcattgtcgttcaaggtgcgtaatattagtaagaagtatttatcagcttaacgtgataacaataatagtaatatgaaatatttattaaattttttataattaatctctgctagaaaatttgattaatcatttttagtagaatttgttttttctcaactaggttttaaacaccac

SEQ ID NO: 6259 - DNA, 460 bp, Artificial
  Mutations within GlyA3B4 introduced by GmGlyA3B4_T03TALE nuclease
gttcatgtacggttgcagatataaacgaagcatagcttatgtatgaggtgtaacaaaattggaaacaatagccatgcaaggtgaagaatgtcaccaactcagaaacccttcttcattgacgtgtccctcactcactctcctctcttcactataaatcgccactcttcgtgttctccacttcaccaactccttcaaacttattaacactttccttagttcaatatggggaagcccttcttcactctctctctttcttccctttgcttgctactcttgtcgagtgcatgctttgctattacctcaacgcgttggaacccgaccaccgcgttgagtccgaaggtggtcttattgaaacatggaactctcaacaccccgatgacgtcgattgccaagtgccggtccgggttcagcttgtttccaaaacctggcatttcccccaaactcaccggccaaccccggt

SEQ ID NO: 6260 - DNA, 666 bp, Artificial
  Mutations within GlyA3B4 introduced by GmGlyA3B4_T03TALE nuclease
gttcatgtacggttgcagatataaacgaagcatagcttatgtatgaggtgtaacaaaattggaaacaatagccatgcaaggtgaagaatgtcaccaactcagaaaccccttcttcattgacgtgtccctcactcactctcctctcttcactataaatcgccactcttcgtgttctccacttcaccaactccttcaaacttattaacactttccttagttcaatatggggaagcccttcttcactctctctctttcttccctttgcttgctactcttgtcgagtgcatgctttgctattacctccagcaagttcgtgccaactcaacaacctcaacgcgttggaacccgaccaccgcgttgagtccgaaggtggtcttattgaaacatggaactctcaacaccctgagctgcaatgcgccggtgtcactgtttccaaacgcaccctcaaccgcaacggcctccacttgccatcttactcaccttatcccccaaatgatcattgtcgttcaaggtgcgtaatattagtaagaagtatttatcagcttaacgtgataacaatatagtaatatgaaatatttattaaatttttataattaatctctgctagaaaatttgattaatcattttagtagaatttgttttctcaactaggtttttaaaacacca

SEQ ID NO: 6261 - DNA, 665 bp, Artificial
  Mutations within GlyA3B4 introduced by GmGlyA3B4_T03TALE nuclease
gttcatgtacggttgcagatataaacgaagcatagcttatgtatgaggtgtaacaaaattggaaacaatagccatgcaaggtgaagaatgtcaccaactcagaaacccttcttcattgacgtgtccctcactcactctcctctcttcactataaatcgccactcttcgtgttctccacttcaccaactccttcaaacttattaacactttccttagttcaatatggggaagcccttcttcactctctctctttcttccctttgcttgctactcttgtcgagtgcatgctttgctattacctccagcaagtcagtgccaactcaacaacctcaacgcgttggaacccgaccaccgcgttgagtccgaaggtggtcttattgaaacatggaactctcaacaccctgagctgcaatgcgccggtgtcactgtttccaaacgcaccctcaaccgcaacggcctccacttgccatcttactcaccttatccccaaatgatcattgtcgttcaaggtgcgtaatattagtaagaagtatttatcagcttaacgtgataacaataatagtaatatgaaatatttattaaatttttataattaatctctgctagaaaatttgattaatcattttagtagaatttgtttttctcaactaggttttaaaacacca

SEQ ID NO: 6262 - DNA, 635 bp, Artificial
  Mutations within GlyA3B4 introduced by GmGlyA3B4_T03TALE nuclease
gttcatgtacggttgcagatataaacgaagcatagcttatgtatgaggtgtaacaaaattggaaacaatagccatgcaaggtgaagaatgtcaccaactcagaaacccttcttcattgacgtgtccctcactcactctcctctcttcactataaatcgccactcttcgtgttctccacttcaccaactccttcaaacttattaacactttccttagttcaatatggggaagcccttcttcactctctctctttcttccctttgcttgctactcttgtcgagtgcatgctttgctattacctccagcaagagtgccaactcaacaacctcaacgcgttggaacccgaccaccgcgttgagtccgaaggtggtcttattgaaacatggaactctcaacaccctgagctgcaatgcgccggtgtcactgtttccaaacgcaccctcaaccgcaacggcctccacttgccatcttactcaccttatccccaaatgatcattgtcgttcaaggtgcgtaatattagtaagaagtatttatcagcttaacgtgataacaatatagtaatatgaaatatttattaaatttttataatttaatctctgctagaaaatttgattaatcattttagtagaatttg

SEQ ID NO: 6263 - DNA, 674 bp, Artificial
  Mutations within GlyA3B4 introduced by GmGlyA3B4_T03TALE nuclease
gttcatgtacggttgcagatataaacgaagcatagcttatgtatgaggtgtaacaaaaattggaaacaatagccatgcaaggtgaagaatgtcaccaactcagaaacccttcttcattgacgtgtccctcactcactctcctctcttcactataaatcgccactcttcgtgttctccacttcaccaactccttcaaacttattaacactttccttagttcaatatgggggaagcccttcttcactctctctctttcttccctttgcttgctactcttgtcgagtgcatgctttgctattacctccagcaagttgccaactcacaacctcaacgcgttgaacccagaccacctggcagttgcagtcccgaacggtggttcttattgaaacatgggaactctcaacaccctgagctgcaatgcgccaggtgtcactgtttccaaacgcaccctcaaccgcaacggcctccacttgccatcttactcaccttatccccaaatgatcattgtcgttcaaggtgcgtaatattagtaagaagtatttatcagcttaacgtgataacaataatagtaatatgaaatatttattaaatttttataattaatctctgctagaaaatttgattaatcatttttagtagaatttgtttttctcaactaggtttttaaaacacca

SEQ ID NO: 6264 - DNA, 662 bp, Artificial
  Mutations within GlyA3B4 introduced by GmGlyA3B4_T03TALE nuclease
gttcatgtacggttgcagatataaacgaagcatagcttatgtatgaggtgtaacaaaattggaaacaatagccatgcaaggtgaagaatgtcaccaactcagaaacccttcttcattgacgtgtccctcactcactctcctctcttcactataaatcgccactcttcgtgttctccacttcaccaactccttcaaacttattaacactttccttagttcaatatggggaagcccttcttcactctctctctttcttccctttgcttgctactcttgtcgagtgcatgctttgctattacctccagcaagagtgccaactcaacaacctcaacgcgttggaacccgaccaccgcgttgagtccgaaggtggtcttattgaaacatggaactctcaacaccctgagctgcaatgcgccggtgtcactgtttccaaacgcaccctcaaccgcaacggcctccacttgccatcttactcaccttatccccaaatgatcattgtcgttcaaggtgcgtaatattagtaagaagtatttatcagcttaacgtgataacaatatagtaatatgaaatatttattaaatttttataattaatctctgctagaaaatttgattaatcattttagtagaatttgttttctcaactaggtttttaaaacacca

SEQ ID NO: 6265 - DNA, 618 bp, Artificial; identical to SEQ ID NO: 5686
  Mutations within GlyA3B4 introduced by GmGlyA3B4_T03TALE nuclease

SEQ ID NO: 6266 - DNA, 664 bp, Artificial; identical to SEQ ID NO: 5916
  Mutations within GlyA3B4 introduced by GmGlyA3B4_T03TALE nuclease

SEQ ID NO: 6267 - DNA, 638 bp, Artificial
  Mutations within GlyA3B4 introduced by GmGlyA3B4_T03TALE nuclease
gttcatgtacggttgcagatataaacgaagcatagcttatgtatgaggtgtaacaaaattggaaacaatagccatgcaaggtgaagaatgtcaccaactcagaaacccttcttcattgacgtgtccctcactcactctcctctcttcactataaatcgccactcttcgtgttctccacttcaccaactccttcaaacttattaacactttccttagttcaatatggggaagcccttcttcactctctctctttcttccctttgcttgctactcttgtcgagtgcatgctttgctattacctccagcaagttagtgccaactcaacaacctcaacgcgttggaacccgaccaccgcgttgagtccgaaggtggtcttattgaaacatggaactctcaacaccctgagctgcaatgcgccggtgtcactgtttccaaacgcaccctcaaccgcaacggcctccacttgccatcttactcaccttatcccccaaatgatcattgtcgttcaaggtgcgtaatattagtaagaagtatttatcagcttaacgtgataacaatatagtaatatgaaatatttattaaatttttataatttaatctctgctagaaaatttgattaatcattttagtagaatttg

SEQ ID NO: 6268 - DNA, 622 bp, Artificial; identical to SEQ ID NO: 5586
  Mutations within GlyA3B4 introduced by GmGlyA3B4_T03TALE nuclease

SEQ ID NO: 6269 - DNA, 621 bp, Artificial; identical to SEQ ID NO: 4238
  Mutations within GlyA3B4 introduced by GmGlyA3B4_T03TALE nuclease

SEQ ID NO: 6270 - DNA, 661 bp, Artificial
  Mutations within GlyA3B4 introduced by GmGlyA3B4_T03TALE nuclease
gttcatgtacggttgcagatataaacgaagcatagcttatgtatgaggtgtaacaaaattggaaacaatagccatgcaaggtgaagaatgtcaccaactcagaaacccttcttcattgacgtgtccctcactcactctcctctcttcactataaatcgccactcttcgtgttctccacttcaccaactccttcaaacttattaacactttccttagttcaatatggggaagcccttcttcactctctctctttcttccctttgcttgctactcttgtcgagtgcatgctttgctattacctccagcaagttgtgccaactcaacaacctcaacgcgttggaacccgaccaccgcgttgagtccgaaggtggtcttattgaaacatggaactctcaacaccctgagctgcaatgtgccggtgtcactgtttccaaacgccaccctcaaccgcaacggcctccacttgccatcttactcacccttatccccaaatgatcattgtcgttcaaggtgcgtaatattagtaagaagtatttatcagcttaacgtgataacaataatagtaatatgaaatatttattaaatttttataattaatctctgctagaaatttgattaatcatttttatgtagaatttgtttttctcaactaggttttaaa

SEQ ID NO: 6271 - DNA, 677 bp, Artificial
  Mutations within GlyA3B4 introduced by GmGlyA3B4_T03TALE nuclease
gttcatgtacggttgcagatataaacgaagcatagcttatgtatgaggtgtaacaaaattggaaacaatagccatgcaaggtgaagaatgtcaccaactcagaaacccttcttcattgacgtgtccctcactcactctcctctcttcactataaatcgccactcttcgtgttctccacttcaccaactccttcaaacttattaacactttccttagttcaatatggggaagcccttcttcactctctctctttcttccctttgcttgctactcttgtcgagtgcatgctttgctattacctccagcaagttcacgctacgctacatcaaacctcaacctcagcgcgtttgggaaaccccgacccaccgcgttgagtccgaaggtggtcttattgaaacatggaactctcaacaccctgagctgcaatgcgccggtgtcactgtttccaaacgcaccctcaaccgcaacggcctccacttgccatcttactcaccttatccccaaatgatcattgtcgttcaaggtgcgtaatattagtaagagtatttatcagcttaacgtgataacaataatagtaatatgaaatatttattaaatttttataattaatctctgctagaaaatttgattaatcattttagtagaatttgtttttctcaactaggttttaaacacca

SEQ ID NO: 6272 - DNA, 396 bp, Artificial
  Mutations within GlyA3B4 introduced by GmGlyA3B4_T03TALE nuclease
gttcatgtacggttgcagatataaacgaagcatagcttatgtatgaggtgtaacaaaattggaaacaatagccatgcaaggtgaagaatgtcaccaactcagaaacccttcttcattgacgtgtccctcactcactctcctctcttcactataaatcgccactcttcgtgttctccacttcaccaactccttcaaacttattaacactttccttagttcaatatggggaagcccttcttcactctctctctttcttccctttgcttgctactcttgtcgagtgcatgctttgctattacctccagcaagttcaacaataatagtaatatgaaatatttattaaattttttataattaatctctgctagaaaatttgattaatcatttttagtagaa

SEQ ID NO: 6273 - DNA, 657 bp, Artificial
  Mutations within GlyA3B4 introduced by GmGlyA3B4_T03TALE nuclease
  misc_feature (532): n is a or c or t or g
gttcatgtacggttgcagatataaacgaagcatagcttatgtatgaggtgtaacaaaattggaaacaatagccatgcaaggtgaagaatgtcaccaactcagaaacccttcttcattgacgtgtccctcactcactctcctctcttcactataaatcgccactcttcgtgttctccacttcaccaactccttcaaacttattaacactttccttagttcaatatggggaagcccttcttcactctctctctttcttccctttgcttgctactcttgtcgagtgcatgctttgctattacctccagcaagttcgagtgccaactcaacaacctcaacgcgttggaacccgaccaccgcgttgagtccgaaggtggtcttattgaaacatggaactctcaacaccctgagctgcaatgcgccggtgtcactgtttccaaacgcaccctcaaccgcaacggcctccacttgccatcttactcaccttatccccaaatgatcattgtcgttcaaggtgcgtaatattagtaagagnatttatcagcttaacgtgataacaatatagtaatatgaaaatatttattaaatttttataattaatctctgctagaaaatttgattaatcattttagtagaatttgtttttctcaactaggtttt

SEQ ID NO: 6274 - DNA, 644 bp, Artificial
  Mutations within GlyA3B4 introduced by GmGlyA3B4_T03TALE nuclease
  misc_feature (141): n is a or c or t or g
gttcatgtacggttgcagatataaacgaagcatagcttatgtatgaggtgtaacaaaattggaaacaatagccatgcaaggtgaagaatgtcaccaactcagaaacccttcttcattgacgtgtccctcactcactctccnctcttcactataaatcgccactcttcgtgttctccacttcaccaactccttcaaacttattaacactttccttagttcaatatggggaagcccttcttcactctctctctttcttccctttgcttgctactcttgtcgagtgcatgctttgctattacctccagcaagttcatctcataaataacgtcatgcattacatgttaattattacatgcttaacgtaattcaacaacgagtgccaactcaacaacctcaacgcgttggaacccgaccaccgcgttgagtccgaaggtggtcttattgaaacatggaactctcaacaccctgagctgcaatgcgccggtgtcactgtttccaaacgcaccctcaaccgcaacggcctccacttgccatcttactcaccttatccccaaatgatcattgtcgttcaaggtgcgtaatattagtaagaagtatttatcagcttaacgtgataacaataatagtaatatgaaatatttatt

SEQ ID NO: 6275 - DNA, 665 bp, Artificial
  Mutations within GlyA3B4 introduced by GmGlyA3B4_T03TALE nuclease
gttcatgtacggttgcagatataaacgaagcatagcttatgtatgaggtgtaacaaaaattggaaacaatagccatgcaaggtgaagaatgtcaccaactcagaaacccttcttcattgacgtgtccctcactcactctcctctcttcactataaatcgccactcttcgtgttctccacttcaccaactccttcaaacttattaacactttccttagttcaatatgggggaagcccttcttcactctctctctttcttccctttgcttgctactcttgtcgagtgcatgctttgctattacctccagcatgccaactcaacaacctcaacgcgttggaacccgaccaccgcgttgagtccgaaggtggtcttattgaaacatggaactctcaacaccctgagctgcaatgcgccggtgtcactgtttccaaacgcaccctcaaccgcaacggcctccacttgccatcttactcaccttatccccaaatgatcattgtcgttcaaggtgcgtaatattagtaagaagtatttatcagcttaacgtgataacaataatagtaatatgaaaatatttattaaaattttttataattaatctctgctagaaaatttgattaatcatttttagtagaatttgtttttctcaactaggtttttaaacacca

SEQ ID NO: 6276 - DNA, 661 bp, Artificial; identical to SEQ ID NO: 5651
  Mutations within GlyA3B4 introduced by GmGlyA3B4_T03TALE nuclease

SEQ ID NO: 6277 - DNA, 656 bp, Artificial
  Mutations within GlyA3B4 introduced by GmGlyA3B4_T03TALE nuclease
gttcatgtacggttgcagatataaacgaagcatagcttatgtatgaggtgtaacaaaattggaaacaatagccatgcaaggtgaagaatgtcaccaactcagaaacccttcttcattgacgtgtccctcactcactctcctctcttcactataaatcgccactcttcgtgttctccacttcaccaactccttcaaacttattaacactttccttagttcaatatggggaagcccttcttcactctctctctttcttccctttgcttgctactcttgtcgagtgcatgctttgctattacctccagcaagtagtgccaactcaacaacctcaacgcgttggaacccgaccaccgcgttgagtccgaaggtggtcttattgaaacatggaactctcaacaccctgagctgcaatgcgccggtgtcactgtttccaaacgcaccctcaaccgcaacggcctccacttgccatcttactcaccttatccccaaatgatcattgtcgttcaaggtgcgtaatattagtaagaagtatttatcagcttaacgtgataacaataatagtaatatgaaatatttattaaatttttataatttaatctctgctagaaaatttgattaatcattttagtagaatttgtttttctcaactaggtttt

SEQ ID NO: 6278 - DNA, 656 bp, Artificial; identical to SEQ ID NO: 4941
  Mutations within GlyA3B4 introduced by GmGlyA3B4_T03TALE nuclease

SEQ ID NO: 6279 - DNA, 632 bp, Artificial
  Mutations within GlyA3B4 introduced by GmGlyA3B4_T03TALE nuclease
gttcatgtacggttgcagatataaacgaagcatagcttatgtatgaggtgtaacaaaattggaaacaatagccatgcaaggtgaagaatgtcaccaactcagaaacccttcttcattgacgtgtccctcactcactctcctctcttcactataaatcgccactcttcgtgttctccacttcaccaactccttcaaacttattaacactttccttagttcaatatggggaagcccttcttcactctctctctttcttccctttgcttgctactcttgtcgagtgccaactcaacaacctcaacgcgttggaacccgaccaccgcgttgagtccgaaggtggtcttattgaaacatggaactctcaacaccctgagctgcaatgcgccggtgtcactgtttccaaacgcaccctcaaccgcaacggcctccacttgccatcttactcaccttatccccaaatgatcattgtcgttcaaggtgcgtaatattagtaagaagtatttatcagcttaacgtgataacaataatagtaatatgaaatatttattaatttttataattaatctctgctagaaaatttgattaatcatttttagtagaaatttgtttttctcaactaggtttttaaaaca

SEQ ID NO: 6280 - DNA, 663 bp, Artificial; identical to SEQ ID NO: 5790
  Mutations within GlyA3B4 introduced by GmGlyA3B4_T03TALE nuclease

SEQ ID NO: 6281 - DNA, 621 bp, Artificial
  Mutations within GlyA3B4 introduced by GmGlyA3B4_T03TALE nuclease
gttcatgtacggttgcagatataaacgaagcatagcttatgtatgaggtgtaacaaaaattggaaacaatagccatgcaaggtgaagaatgtcaccaactcagaaacccttcttcattgacgtgtccctcactcactctcctctcttcactataaatcgccactcttcgtgttctccacttcaccaactccttcaaacttattaacactttccttagttcaatatggggaagcccttcttcactctctctctttcttccctttgcttgctactcttgtcgagtgcatgctttgctattacctccagcaagttcaacgccaactcaacaacctcaacgcgttggaacccgaccaccgcgttgagtccgaaggtggtcttattgaaacatggaactctcaacaccctgagctgcaatgcgccggtgtcactgtttccaaacgcaccctcaaccgcaacggcctccacttgccatcttactcaccttatccccaaatgatcattgtcgttcaaggtgcgtaatattagtaagagtatttatcagcttaacgtgataacaatatagtaatatgaaatatttatttaaatttttcataattaatctctgctagaaaatttgattaa

SEQ ID NO: 6282 - DNA, 636 bp, Artificial
  Mutations within GlyA3B4 introduced by GmGlyA3B4_T03TALE nuclease
gttcatgtacggttgcagatataaacgaagcatagcttatgtatgaggtgtaacaaaattggaaacaatagccatgcaaggtgaagaatgtcaccaactcagaaacccttcttcattgacgtgtccctcactcactctcctctcttcactataaatcgccactcttcgtgttctccacttcaccaactccttcaaacttattaacactttccttagttcaatatggggaagcccttcttcactctctctctttcttccctttgcttgctactcttgtcgagtgcatgctttgctattacctccagcaagttcagtgccaactcaacaacctcaacgcgttggaccgaccaccgcgttgagtccgaaggtggtcttattgaaacatggaactctcaacaccctgagctgcaatgcgccggtgtcactgtttccaaacgcaccctcaaccgcaacggcctccacttgccatcttactcaccttatccccaaatgatcattgtcgttcaaggtgcgtaatattagtaagaagtatttatcagcttaacgtgataacaataatagtaatatgaaatatttattaaatttttataattaatctctgctagaaaatttgattaatcattttagtagaatttg

SEQ ID NO: 6283 - DNA, 620 bp, Artificial; identical to SEQ ID NO: 5619
  Mutations within GlyA3B4 introduced by GmGlyA3B4_T03TALE nuclease

SEQ ID NO: 6284 - DNA, 659 bp, Artificial
  Mutations within GlyA3B4 introduced by GmGlyA3B4_T03TALE nuclease
gttcatgtacggttgcagatataaacgaagcatagcttatgtatgaggtgtaacaaaattggaaacaatagccatgcaaggtgaagaatgtcaccaactcagaaacccttcttcattgacgtgtccctcactcactctcctctcttcactataaatcgccactcttcgtgttctccacttcaccaactccttcaaacttattaacactttccttagttcaatatggggaagcccttcttcactctctctctttcttccctttgcttgctactcttgtcgagtgcatgctttgctattacctccagcaagttgccaactcaacaacctcaacgcgttgaacccgaccaccgcgttgagtccgaaggtggtcttattgaacatggactctcaacaccctgagctgcaatgcgccggtgtcactgtttccaaacgcaccctcaaccgcaacggcctccacttgccatcttactcaccttatccccaaatgatcattgtcgttcaaggtgcgtaatattagtaagaagtatttatcagcttaacgtgataacaataatagtaatatgaaatatttattaaatttttataattaatctctgctagaaaatttgattaatcattttagtagaatttgttttctcaactaggtttttaaaacacca

SEQ ID NO: 6285 - DNA, 656 bp, Artificial; identical to SEQ ID NO: 5910
  Mutations within GlyA3B4 introduced by GmGlyA3B4_T03TALE nuclease

SEQ ID NO: 6286 - DNA, 641 bp, Artificial
  Mutations within GlyA3B4 introduced by GmGlyA3B4_T03TALE nuclease
  misc_feature (141): n is a or c or t or g
gttcatgtacggttgcagatataaacgaagcatagcttatgtatgaggtgtaacaaaattggaaacaatagccatgcaaggtgaagaatgtcaccaactcagaaacccttcttcattgacgtgtccctcactcactctccnctcttcactataaatcgccactcttcgtgttctccacttcaccaactccttcaaacttattaacactttccttagttcaatatggggaagcccttcttcactctctctctttcttccctttgcttgctactcttgtcgagtgcatgctttgctattacctccagcaagtgagtgccaactcacaacctcaacgcgttggaacccgaccaccgcgttgagtccgaaggtggtcttattgaaacatggaactctcaacaccctgagctgcaatgcgccggtgtcactgtttccaaacgcaccctcaaccgcaacggcctccacttgcctcttactcaccttatccccaaatgatcattgtcgttcaaggtgcgtaatattagtaagaagtatttatcagcttaacgtgataacaataatagtaatatgaaatatttattaaatttttataattaatctctgctagaaaatttgattaatcattttagtagaatttgtttttc

SEQ ID NO: 6287 - DNA, 653 bp, Artificial
  Mutations within GlyA3B4 introduced by GmGlyA3B4_T03TALE nuclease
gttcatgtacggttgcagatataaacgaagcatagcttatgtatgaggtgtaacaaaattggaaacaatagccatgcaaggtgaagaatgtcaccaactcagaaacccttcttcattgacgtgtccctcactcactctcctctcttcactataaatcgccactcttcgtgttctccacttcaccaactccttcaaacttattaacactttccttagttcaatatggggaagcccttcttcactctctctctttcttccctttgcttgctactcttgtcgagtgcatgctttgctattacctccagcaagtacgccaactcaacaacctcaacgcgttggaacccgaccaccgcgttgagtccgaaggtggtcttattgaaacatggaactctcaacaccctgagctgcaatgcgccggtgtcactgtttccaaacgcaccctcaaccgcaacggcctccacttgccatcttactcaccttatccccaaatgatcattgtcgttcaaggtgcgtaatattagtaagaagtatttatcagcttaacgtgataacaatatagtaatatgaaatatttattaaatttttataattaatctctgctagaaaatttgattaatcattttagtagaatttgttttctcaactaggttttt

SEQ ID NO: 6288 - DNA, 365 bp, Artificial
  Mutations within GlyA3B4 introduced by GmGlyA3B4_T03TALE nuclease
gttcatgtacggttgcagatataaacgaagcatagcttatgtatgaggtgtaacaaaattggaaacaatagccatgcaaggtgaagaatgtcaccaactcagaaacccttcttcattgacgtgtccctcactcactctcctctcttcactataaatcgccactcttcgtgttctccacttcaccaactccttcaaacttattaacactttccttagttcaatatggggaagcccttcttcactctctctctttcttccctttgcttgctactcttgtcgagtgcatgctttgctattacctccagcaaggtcttattgaacatggaactctcaacaccctgagctgcaatgcgccggtgtcactg

SEQ ID NO: 6289 - DNA, 660 bp, Artificial; identical to SEQ ID NO: 5206
  Mutations within GlyA3B4 introduced by GmGlyA3B4_T03TALE nuclease

SEQ ID NO: 6290 - DNA, 658 bp, Artificial; identical to SEQ ID NO: 5081
  Mutations within GlyA3B4 introduced by GmGlyA3B4_T03TALE nuclease

SEQ ID NO: 6291 - DNA, 508 bp, Artificial
  Mutations within GlyA3B4 introduced by GmGlyA3B4_T03TALE nuclease
gttcatgtacggttgcagatataaacgaagcatagcttatgtatgaggtgtaacaaaaattggaaacaatagccatgcaaggtgaagaatgtcaccaactcagaaacccttcttcattgacgtgtccctcactcactctcctctcttcactataaatcgccactcttcgtgttctccacttcaccaactccttcaaacttattaacactttccttagttcaatatggggaagcccttcttcactctctctctttcttccctttgcttgctactcttgtcgagtgcatgctttgctattacctccagcaagttgtgccaactcaacaacctcaacgcgttggaacccgaccaccgcgttgagtccgaaggtggtcttattgaaacatggaactctcaacaccctgagctgcaatgcgccggtgtcactgtttccaaacgcaccctcaaccgcaacggcctccacttgccatcttactcaccttatccccaaatgatcattgtcgttcaa

SEQ ID NO: 6292 - DNA, 622 bp, Artificial; identical to SEQ ID NO: 5263
  Mutations within GlyA3B4 introduced by GmGlyA3B4_T03TALE nuclease

SEQ ID NO: 6293 - DNA, 612 bp, Artificial
  Mutations within GlyA3B4 introduced by GmGlyA3B4_T03TALE nuclease
gttcatgtacggttgcagatataaacgaagcatagcttatgtatgaggtgtaacaaaattggaaacaatagccatgcaaggtgaagaatgtcaccaactcagaaacccttcttcattgacgtgtccctcactcactctcctctcttcactataaatcgccactcttcgtgttctccacttcaccaactccttcaaacttattaacactttccttagttcaatatggggaagcccttcttcactctctctctttcttccctttgcttgctactcttgtcgagtgcatgctttgctattacctccagcaaactcaacaacctcaacgcgttggaacccgaccaccgcgttgagtccgaaggtggtcttattgaaacatggaactctcaacaccctgagctgcaatgcgccggtgtcactgtttccaaacgcaccctcaaccgcaacggcctccacttgccatcttactcaccttatccccaaatgatcattgtcgttcaaggtgcgtaatattagtaagaagtatttatcagcttaacgtgataacaataatagtaatatgaaatatttattaaatttttataattaatctctgctagaaaatttgattaatca

SEQ ID NO: 6294 - DNA, 533 bp, Artificial; identical to SEQ ID NO: 4839
  Mutations within GlyA3B4 introduced by GmGlyA3B4_T03TALE nuclease

SEQ ID NO: 6295 - DNA, 652 bp, Artificial
  Mutations within GlyA3B4 introduced by GmGlyA3B4_T03TALE nuclease
gttcatgtacggttgcagatataaacgaagcatagcttatgtatgaggtgtaacaaaattggaaacaatagccatgcaaggtgaagaatgtcaccaactcagaaacccttcttcattgacgtgtccctcactcactctcctctcttcactataaatcgccactcttcgtgttctccacttcaccaactccttcaaacttattaacactttccttagttcaatatggggaagcccttcttcactctctctctttcttccctttgcttgctactcttgtcgagtgcatgctttgctattacctccagcaagttcaacgcgttggaaccccgaccaccgcgttgagtccgaaggtggtcttattgaaacatggaactctcaacaccctgagctgcaatgcgccggtgtcactgttccaactcagcaccctcaaccgcaacggcctccacttgccatcttactcaccttatcccccaaatgatcattgtcgttcaaggtgcgtaatattagtaagaagtatttatcagcttaacgtgataacaataatagtaatatgaaatatttattaaattttttataattaatctctgctagaaaatttgattaatctttttagtagaatttgttttttctcaactaggttttaaacaccaca

SEQ ID NO: 6296 - DNA, 654 bp, Artificial
  Mutations within GlyA3B4 introduced by GmGlyA3B4_T03TALE nuclease
gttcatgtacggttgcagatataaacgaagcatagcttatgtatgaggtgtaacaaaattggaaacaatagccatgcaaggtgaagaatgtcaccaactcagaaacccttcttcattgacgtgtccctcactcactctcctctcttcactataaatcgccactcttcgtgttctccacttcaccaactccttcaaacttattaacactttccttagttcaatatggggaagcccttcttcactctctctctttcttccctttgcttgctactcttgtcgagtgcatgctttgctattacctccagcaagttcaaactcaacaacctcaacgcgattggaacccgaccaccgcgttgagtccgaaggtggtcttattgaaacatggactctcaacaccctgagctgcaatgcgccggtgtcactgtttccaaacgcaccctcaaccgcaacggcctccacttgccatcttactcaccttatccccaaatgatcattgtcgttcaaggtgcgtaatattagtaagaagtatttatcagcttaacgtgataacaataatagtaatatgaaatatttattaaatttttataattaatctctgctagaaatttgattaatcattttagtagaatttgtttttctcaactaggttttaaa

SEQ ID NO: 6297 - DNA, 653 bp, Artificial
  Mutations within GlyA3B4 introduced by GmGlyA3B4_T03TALE nuclease
gttcatgtacggttgcagatataaacgaagcatagcttatgtatgaggtgtaacaaaattggaaacaatagccatgcaaggtgaagaatgtcaccaactcagaaacccttcttcattgacgtgtccctcactcactctcctctcttcactataaatcgccactcttcgtgttctccacttcaccaactccttcaaacttattaacactttccttagttcaatatggggaagcccttcttcactctctctctttcttccctttgcttgctactcttgtcgagtgcatgctttgctattacctccagcaagtgccaactcaacaacctcaacgcgttggaacccgaccaccgcgttgagtccgaaggtggtcttattgaaacatggaactctcaacaccctgagctgcaatgcgccggtgtcactgtttccaaacgcaccctcaaccgcaacggcctccacttgccatcttactcaccttatccccaaatgatcattgtcgttcaaggtgcgtaatattagtaagaagtatttatcagcttaacgtgataacaataatagtaatatgaaatatttattaaatttttataattaatctctgctagaaaatttgattaatcattttagtagaatttgtttttctcaactaggttttt

SEQ ID NO: 6298 - DNA, 648 bp, Artificial
  Mutations within GlyA3B4 introduced by GmGlyA3B4_T03TALE nuclease
gttcatgtacggttgcagatataaacgaagcatagcttatgtatgaggtgtaacaaaattggaaacaatagccatgcaaggtgaagaatgtcaccaactcagaaacccttcttcattgacgtgtccctcactcactctcctctcttcactataaatcgccactcttcgtgttctccacttcaccaactccttcaaacttattaacactttccttagttcaatatggggaagcccttcttcactctctctctttcttccctttgcttgctactcttgtcgagtgcatgctttgctattacctccagcaagtagtgccaactcaacaacctcaacgcgttggaacccgaccaccgcgttgagtccgaaggtggtcttattgaaacatggaactctcaacaccctgagctgcaatgcgccggtgtcactgttttccaaaacgcaccctcaaccgcaacggcctccacttgccatcttactcaccttatccccaaatgatcattgtcgttcaaggtgcgtaatattagtaagaagtatttatcagcttaacgtgataacaatatagtaatatgaaatatttattaaatttttataattaatctctgctagaaaatttgattaatcatttttagtagaatttgtttttctcaa

SEQ ID NO: 6299 - DNA, 668 bp, Artificial
  Mutations within GlyA3B4 introduced by GmGlyA3B4_T03TALE nuclease
gttcatgtacggttgcagatataaacgaagcatagcttatgtatgaggtgtaacaaaattggaaacaatagccatgcaaggtgaagaatgtcaccaactcagaaacccttcttcattgacgtgtccctcactcactctcctctcttcactataaatcgccactcttcgtgttctccacttcaccaactccttcaaacttattaacactttccttagttcaatatggggaagcccttcttcactctctctctttcttccctttgcttgctactcttgtcgagtgcatgctttgctattacctccagcaagttagtgccaactcaacaacctcaacgcgttggaacccgaccaccgcgttgagtccgaaggtggtcttattgaaacatggaactctcaacaccctgagctgcaatgcgccggtgtcactgtttccaaacgcaccctcaaccgcaacggcctccacttgccatcttactcaccttatcccccaaatgatcattgtcgttcaaggtgcgtaatattagtaagaagtatttatcagcttaacgtgataacaataatagtaatatgaaatatttattaaatttttataattaatctctgctagaaaatttgattaatcatttttagtagaatttgtttttctcaactaggtttttaaaacacca

SEQ ID NO: 6300 - DNA, 413 bp, Artificial
  Mutations within GlyA3B4 introduced by GmGlyA3B4_T03TALE nuclease
gttcatgtacggttgcagatataaacgaagcatagcttatgtatgaggtgtaacaaaaattggaaacaatagccatgcaaggtgaagaatgtcaccaactcagaaacccttcttcattgacgtgtccctcactcactctcctctcttcactataaatcgccactcttcgtgttctccacttcaccaactccttcaaacttattaacactttccttagttcaatatgggggaagcccttcttcactctctctctttcttccctttgcttgctactcttgtcgagtgcatgctttgctattacctccagcaagttcgagtgccaactcaacaaccttcaacgcgttggaacccgaccaccgcgttgagtccgaaggtggtcttattgaacatggaactctcaacaccctgagctg

SEQ ID NO: 6301 - DNA, 636 bp, Artificial
  Mutations within GlyA3B4 introduced by GmGlyA3B4_T03TALE nuclease
gttcatgtacggttgcagatataaacgaagcatagcttatgtatgaggtgtaacaaaattggaaacaatagccatgcaaggtgaagaatgtcaccaactcagaaacccttcttcattgacgtgtccctcactcactctcctctcttcactataaatcgccactcttcgtgttctccacttcaccaactccttcaaacttattaacactttccttagttcaatatggggaagcccttcttcactctctctctttcttccctttgcttgctactcttgtcgagtgcatgctttgctattacctccagcaagtagtgccaactcaacaacctcaacgcgttggaacccgaccaccgcgttgagtccgaaggtggtcttattgaaacatggaactctcaacaccctgagctgcaatgcgccggtgtcactgtttccaaacgcaccctcaaccgcaacggcctccacttgccatcttactcaccttatccccaaatgatcattgtcgttcaaggtgcgtaatattagtaagaagtatttatcggcttaacgtgataacaataatagtaatatgaaatatttattaaatttttataattaatctctgctagaaaatttgattaatcattttagtagaatttg

SEQ ID NO: 6302 - DNA, 659 bp, Artificial
  Mutations within GlyA3B4 introduced by GmGlyA3B4_T03TALE nuclease
gttcatgtacggttgcagatataaacgaagcatagcttatgtatgaggtgtaacaaaattggaaacaatagccatgcaaggtgaagaatgtcaccaactcagaaacccttcttcattgacgtgtccctcactcactctcctctcttcactataaatcgccactcttcgtgttctccacttcaccaactccttcaaacttattaacactttccttagttcaatatggggaagcccttcttcactctctctctttcttccctttgcttgctactcttgtcgagtgcatgctttgctattacctccagcaagttcgagtgccaactcaacaacctcaacgcgttggaacccgaccaccgcgttgagtccgaaggtggtcttattgaaacatggaactctcaacaccctgagctgcaatgcgccggtgtcactgtttccaaacgcaccctcaaccgcaacggcctccacttgccatcttactcaccttatccccaaatgatcattgtcgttcaaggtgcgtaatattagtaagaagtatttatcagcttaacgtgataacaatatagtaatatgaaatatttattaaatttttataattaatctctgctagaaaatttgattaatcattttagtagaatttgttttctcaactaggttttaaa

SEQ ID NO: 6303 - DNA, 639 bp, Artificial
  Mutations within GlyA3B4 introduced by GmGlyA3B4_T03TALE nuclease
gttcatgtacggttgcagatataaacgaagcatagcttatgtatgaggtgtaacaaaattggaaacaatagccatgcaaggtgaagaatgtcaccaactcagaaaccccttcttcattgacgtgtccctcactcactctcctctcttcactataaatcgccactcttcgtgttctccacttcaccaactccttcaaacttattaacactttccttagttcaatatggggaagcccttcttcactctctctctttcttccctttgcttgctactcttgtcgagtgcatgctttgctattacctccagcaagttgagtgccaactcaacaacctcaacgcgttggaacccgaccaccgcgttgagtccgaaggtggtcttattgaaacatggaactctcaacaccctgagctgcaatgcgccggtgtcactgtttccaaacgcaccctcaaccgcaacggcctccacttgccatcttactcaccttatcccccaaatgatcattgtcgttcaaggtgcgtaatattagtaagaagtatttatcagcttaacgtgataacaatatagtaatatgaaatatttattaaatttttataattaatctctgctagaaaatttgattaatcattttagtagaatttg

SEQ ID NO: 6304 - DNA, 617 bp, Artificial
  Mutations within GlyA3B4 introduced by GmGlyA3B4_T03TALE nuclease
gttcatgtacggttgcagatataaacgaagcatagcttatgtatgaggtgtaacaaaattggaaacaatagccatgcaaggtgaagaatgtcaccaactcagaaacccttcttcattgacgtgtccctcactcactctcctctcttcactataaatcgccactcttcgtgttctccacttcaccaactccttcaaacttattaacactttccttagttcaatatggggaagcccttcttcactctctctctttcttccctttgcttgctactcttgtcgagtgcatgctttgctattacctccagcaagtgccaactcaacaacctcaacgcgttggaacccgaccaccgcgttgagtccgaaggtggtcttattgaacatggaactctcaacaccctgagctgcaatgcgccggtgtcactgtttccaaacgcaccctcaaccgcaacggcctccacttgccatcttactcaccttatccccaaatgatcattgtcgttcaaggtgcgtaatattagtaagaagtatttatcagcttaacgtgataacaatatagtaatatgaaatatttattaaatttttataatttaatctctgctagaaaatttgattaatca

SEQ ID NO: 6305 - DNA, 655 bp, Artificial
  Mutations within GlyA3B4 introduced by GmGlyA3B4_T03TALE nuclease
  misc_feature (530): n is a or c or t or g
gttcatgtacggttgcagatataaacgaagcatagcttatgtatgaggtgtaacaaaattggaaacaatagccatgcaaggtgaagaatgtcaccaactcagaaacccttcttcattgacgtgtccctcactcactctcctctcttcactataaaatcgccactcttcgtgttctccacttcaccaactccttcaaacttattaacactttccttagttcaatatggggaagcccttcttcactctctctctttcttccctttgcttgctactcttgtcgagtgcatgctttgctattacctccagcaagttcgagtgccaactcaacaacctcaacgcgttggaacccgaccaccgcgttgagtccgaaggtggtcttattgaaacatggaactctcaacaccctgagctgcaatgcgccggtgtcactgtttccaacgcacctcaaccgcaacggctccacttgccatcttactcaccttatccccaaatgatcattgtcgttcaaggtgcgtaatattagtaagagnatttatcagcttaacgtgataacaatatagtaatatgaaatatttattaaatttttataattaatctctgctagaaaatttgattaatcattttagtagaatttgtttttctcaactaggttttt

SEQ ID NO: 6306 - DNA, 645 bp, Artificial; identical to SEQ ID NO: 5301
  Mutations within GlyA3B4 introduced by GmGlyA3B4_T03TALE nuclease

SEQ ID NO: 6307 - DNA, 468 bp, Artificial
  Mutations within GlyA3B4 introduced by GmGlyA3B4_T03TALE nuclease
gttcatgtacggttgcagatataaacgaagcatagcttatgtatgaggtgtaacaaaaattggaaacaatagccatgcaaggtgaagaatgtcaccaactcagaaacccttcttcattgacgtgtccctcactcactctcctctcttcactataaatcgccactcttcgtgttctccacttcaccaactccttcaaacttattaacactttccttagttcaatatggggaagcccttcttcactctctctctttcttccctttgcttgctactcttgtcgagtgcatgctttgctattacctccagcaatggcgatggccaccacctgctgggggtcaagccgtgggcctggcacagcaccggcatgccactcacacctcaacgcgttggaacccgaccaccgcgttgagtccgaaggctggtcttattgaaacatggaactctcaacaccctgagctgcaatgcgcc

SEQ ID NO: 6308 - DNA, 461 bp, Artificial
  Mutations within GlyA3B4 introduced by GmGlyA3B4_T03TALE nuclease
gttcatgtacggttgcagatataaacgaagcatagcttatgtatgaggtgtaacaaaattggaaacaatagccatgcaaggtgaagaatgtcaccaactcagaaacccttcttcattgacgtgtccctcactcactctcctctcttcactataaatcgccactcttcgtgttctccacttcaccaactccttcaaacttattaacactttccttagttcaatatggggaagcccttcttcactctctctctttcttccctttgcttgctactcttgtcgagtgcatgctttgctattacctccagcaagtccaaactgcgtaacaagccctaccaatcgacgattggaacccctcaagcagccagccttggcaagttgcccaggatccccgaaaccgggtcgggtttgcattgatttgccaaagaacggattggggaacttcctttattcgaaaaaccaat

SEQ ID NO: 6309 - DNA, 592 bp, Artificial
  Mutations within GlyA3B4 introduced by GmGlyA3B4_T03TALE nuclease
gttcatgtacggttgcagatataaacgaagcatagcttatgtatgaggtgtaacaaaattggaaacaatagccatgcaaggtgaagaatgtcaccaactcagaaacccttcttcattgacgtgtccctcactcactctcctctcttcactataaatcgccactcttcgtgttctccacttcaccaactccttcaaacttattaacactttccttagttcaatatggggaagcccttcttcactctctctctttcttccctttgcttgctactcttgtcgagtgcatgctttgctattacctccagcaaggtcttattgaaacatggaactctcaacaccctgagctgcaatgcgccggtgtcactgtttccaaacgcaccctcaaccgcaacggcctccacttgccatcttactcaccttatccccaaatgatcattgtcgttcaaggtgcgtaatattagtaagaagtatttatcagcttaacgtgataacaataatagtaatatgaaatatttattaaattttttataattaatctctgctagaaaatttgattaatcatttttagtagaatttgtttttctcaactagg

SEQ ID NO: 6310 - DNA, 665 bp, Artificial; identical to SEQ ID NO: 6047
  Mutations within GlyA3B4 introduced by GmGlyA3B4_T03TALE nuclease

SEQ ID NO: 6311 - DNA, 609 bp, Artificial
  Mutations within GlyA3B4 introduced by GmGlyA3B4_T03TALE nuclease
gttcatgtacggttgcagatataaacgaagcatagcttatgtatgaggtgtaacaaaattggaaacaatagccatgcaaggtgaagaatgtcaccaactcagaaacccttcttcattgacgtgtccctcactcactctcctctcttcactataaatcgccactcttcgtgttctccacttcaccaactccttcaaacttattaacactttccttagttcaatatggggaagcccttcttcactctctctctttcttccctttgcttgctactcttgtcgagtgcatgctttgctattacctccagcaaactcaacaacctcaacgcgttggaacccgaccaccgcgttgagtccgaaggtggtcttattgaacatggaactctcaacaccctgagctgcaatgcgccggtgtcactgtttccaaacgcaccctcaaccgcaacggcctccacttgccatcttactcaccttatccccaaatgatcattgtcgttcaaggtgcgtaatattagtaagaagtatttatcagcttaacgtgatacaatatagtaatatgaaatatttattaaatttttataattaatctctgctagaaaatttgattaatca

SEQ ID NO: 6312 - DNA, 543 bp, Artificial
  Mutations within GlyA3B4 introduced by GmGlyA3B4_T03TALE nuclease
gttcatgtacggttgcagatataaacgaagcatagcttatgtatgaggtgtgaacaaaaattggaaacaatagccatgcaaggtgaagaatgtcaccaactcagaaacccttcttcattgacgtgtccctcactcactctcctctcttcactataaatcgccactcttcgtgttctccacttcaccaactccttcaaacttattaacactttccttagttcaatatggggaagcccttcttcactctctctctttcttccctttgcttgctactcttgtcgagtgcatgctttgctattacctccagcagtagtgccaactcaacaacctcaacgcgttggaacccgaccaccgcgttgagtccgaaggtggtcttattgaaacatggaactctcaacaccctgagctgcaatgcgccggtgtcactgtttccaaacgcaccctcaaccgcaacggcctccacttgccatcttactcaccttatccccaaatgatcattgtcgttcaaggtgcgtaatattagtaagaagtatttatcagctt

SEQ ID NO: 6313 - DNA, 632 bp, Artificial
  Mutations within GlyA3B4 introduced by GmGlyA3B4_T03TALE nuclease
gttcatgtacggttgcagatataaacgaagcatagcttatgtatgaggtgtaacaaaattggaaacaatagccatgcaaggtgaagaatgtcaccaactcagaaacccttcttcattgacgtgtccctcactcactctcctctcttcactataaatcgccactcttcgtgttctccacttcaccaactccttcaaacttattaacactttccttagttcaatatggggaagcccttcttcactctctctctttcttccctttgcttgctactcttgtcgagtgccaactcaacaacctcaacgcgttggaacccgaccaccgcgttgagtccgaaggtggtcttattgaaacatggaactctcaacaccctgagctgcaatgcgccggtgtcactgtttccaaacgcaccctcaaccgcaacggcctccacttgccatcttactcaccttatcccccaaatgatcattgtcgttcaaggtgcgtaatattagtaagaagtatttatcagcttaacgtgataacaataatagtaatatgaaatatttattaattttttataattaatctctgctagaaaatttgattaatcatttttagtagaatttgtttttctcaactaggtttttaaaca

SEQ ID NO: 6314 - DNA, 643 bp, Artificial
  Mutations within GlyA3B4 introduced by GmGlyA3B4_T03TALE nuclease
gttcatgtacggttgcagatataaacgaagcatagcttatgtatgaggtgtaacaaaattggaaacaatagccatgcaaggtgaagaatgtcaccaactcagaaacccttcttcattgacgtgtccctcactcactctcctctcttcactataaatcgccactcttcgtgttctccacttcaccaactccttcaaacttattaacactttccttagttcaatatggggaagcccttcttcactctctctctttcttccctttgcttgctactcttgtcgagtgcatgctttgctattacctccagcaaaactcaacaacctcaacgcgttggaacccgaccaccgcgttgagtccgaaggtggtcttattgaaacatggaactctcaacaccctgagctgcaatgcgccggtgtcactgtttccaaacgcaccctcaaccgcaacggcctccacttgccatcttactcaccttatccccaaatgatcattgtcgttcaaggtgcgtaatattagtaagaagtatttatcagcttaacgtgataacaataatagtaatatgaaatatttattaaatttttataattaatctctgctagaaaatttgattaatcattttagtagaatttgtttttctcaactagg

SEQ ID NO: 6315 - DNA, 646 bp, Artificial; identical to SEQ ID NO: 5043
  Mutations within GlyA3B4 introduced by GmGlyA3B4_T03TALE nuclease

SEQ ID NO: 6316 - DNA, 622 bp, Artificial
  Mutations within GlyA3B4 introduced by GmGlyA3B4_T03TALE nuclease
gttcatgtacggttgcagatataaacgaagcatagcttatgtatgaggtgtaacaaaattggaaacaatagccatgcaaggtgaagaatgtcaccaactcagaaacccttcttcattgacgtgtccctcactcactctcctctcttcactataaatcgccactcttcgtgttctccacttcaccaactccttcaaacttattaacactttccttagttcaatatggggaagcccttcttcactctctctctttcttccctttgcttgctactcttgtcgagtgcatgctttgctattacctccagcaagttgtgccaactcaacaacctcaacgcgttggaacccgaccaccgcgttgagtccgaaggtggtcttattgaaacatggaactctcaacaccctgagctgcaatgcgccggtgtcactgtttccaaacgcaccctcaaccgcaacggcctccacttgccatcttactcaccttatccccaaatgatcattgtcgttcaaggtgcgtaatattagtaagaagtatttatcagcttaacgtgataacaataatagtaatatgaaatatttattaaatttttataatttaatctctgctagaaaatttgattaatca

SEQ ID NO: 6317 - DNA, 661 bp, Artificial
  Mutations within GlyA3B4 introduced by GmGlyA3B4_T03TALE nuclease
gttcatgtacggttgcagatataaacgaagcatagcttatgtatgaggtgtaacaaaattggaaacaatagccatgcaaggtgaagaatgtcaccaactcagaaacccttcttcattgacgtgtccctcactcactctcctctcttcactataaatcgccactcttcgtgttctccacttcaccaactccttcaaacttattaacactttccttagttcaatatggggaagcccttcttcactctctctctttcttccctttgcttgctactcttgtcgagtgcatgctttgctattacctccagcaagtgccaactcaacaacctcaacgcgttggaacccgaccaccgcgttgagtccgaaggtggtcttattgaaacatggaactctcaacaccctgagctgcaatgcgccggtgtcactgtttccaaacgcaccctcaaccgcaacggcctccacttgccatcttactcaccttatccccaaatgatcattgtcgttcaaggtgcgtaatattagtaagaagtatttatcagcttaacgtgataacaataatagtaatatgaaatatttattaaatttttataattaatctctgctagaaaatttgattaatcattttcagtagaatttgttttctcaactaggttttaaaacacca

SEQ ID NO: 6318 - DNA, 614 bp, Artificial
  Mutations within GlyA3B4 introduced by GmGlyA3B4_T03TALE nuclease
gttcatgtacggttgcagatataaacgaagcatagcttatgtatgaggtgtaacaaaattggaaacaatagccatgcaaggtgaagaatgtcaccaactcagaaacccttcttcattgacgtgtccctcactcactctcctctcttcactataaatcgccactcttcgtgttctccacttcaccaactccttcaaacttattaacactttccttagttcaatatggggaagcccttcttcactctctctctttcttccctttgcttgctactcttgtcgagtgcatgctttgctattacctccagtgccaactcaacaacctcaacgcgttggaacccgaccaccgcgttgagtccgaaggtggtcttattgaaacatggaactctcaacaccctgagctgcaatgcgccggtgtcactgtttccaaacgcaccctcaaccgcaacggcctccacttgccatcttactcaccttatccccaaatgatcattgtcgttcaaggtgcgtaatattagtaagaagtatttatcagcttaacgtgataacaataatagtaatatgaaatatttattaaatttttataattaatctctgctagaaaatttgattaatca

SEQ ID NO: 6319 - DNA, 660 bp, Artificial
  Mutations within GlyA3B4 introduced by GmGlyA3B4_T03TALE nuclease
gttcatgtacggttgcagatataaacgaagcatagcttatgtatgaggtgtaacaaaattggaaacaatagccatgcaaggtgaagaatgtcaccaactcagaaacccttcttcattgacgtgtccctcactcactctcctctcttcactataaatcgccactcttcgtgttctccacttcaccaactccttcaaacttattaacactttccttagttcaatatggggaagcccttcttcactctctctctttcttccctttgcttgctactcttgtcgagtgcatgctttgctattacctccagcaagttcgagtgccaactcaacaacctcaacgcgttggaacccgaccaccgcgttgagtccgaaggtggtcttattgaaacatggaactctcaacaccctgagctgcaatgcgccggtgtcactgtttccaaacgcaccctcaaccgcaacggcctccacttgccatcttactcaccttatccccaaatgatcattgtcgttcaaggtgcgtaatattagtaagagtatttatcagcttaacgtgataacaataatagtaatatgaaatatttattaaatttttataattaatctctgctagaaaatttgattaatcattttagtagaatttgtttttctcaactaggttttaaa

SEQ ID NO: 6320 - DNA, 465 bp, Artificial
  Mutations within GlyA3B4 introduced by GmGlyA3B4_T03TALE nuclease
gttcatgtacggttgcagatataaacgaagcatagcttatgtatgaggtgtaacaaaaattggaaacaatagccatgcaaggtgaagaatgtcaccaactcagaaaccccttcttcattgacgtgtccctcactcactctcctctcttcactataaatcgccactcttcgtgttctccacttcaccaactccttcaaacttattaacactttccttagttcaatatggggaagcccttcttcactctctctctttcttccctttgcttgctactcttgtcgagtgcatgcttttgctattaccttccagcaaaacaaccttcaacgcgttggaaccctgaccaccgcgttgagtccgaggtggtcttattgaaacatggactctcaacacctgagctgcaatgcgccggtgtcactgtttccaacgcacctcaaccgcaacggcctccacttgccatcttactca

SEQ ID NO: 6321 - DNA, 660 bp, Artificial; identical to SEQ ID NO: 6319
  Mutations within GlyA3B4 introduced by GmGlyA3B4_T03TALE nuclease

SEQ ID NO: 6322 - DNA, 623 bp, Artificial; identical to SEQ ID NO: 4845
  Mutations within GlyA3B4 introduced by GmGlyA3B4_T03TALE nuclease

SEQ ID NO: 6323 - DNA, 618 bp, Artificial
  Mutations within GlyA3B4 introduced by GmGlyA3B4_T03TALE nuclease
  misc_feature (362): n is a or c or t or g
gttcatgtacggttgcagatataaacgaagcatagcttatgtatgaggtgtaacaaaaattggaaacaatagccatgcaaggtgaagaatgtcaccaactcagaaacccttcttcattgacgtgtccctcactcactctcctctcttcactataaatcgccactcttcgtgttctccacttcaccaactccttcaaacttattaacactttccttagttcaatatggggaagcccttcttcactctctctctttcttccctttgcttgctactcttgtcgagtgcatgctttgctattacctccagcaagttgtgccaactcaacaacctcaacgcgttggaacccgaccaccgcgttgagnccgaaggtggtcttattgaaacatggaactctcaacaccctgagctgcaatgcgccggtgtcactgtttccaaacgcaccctcaaccgcaacggcctccacttgccatcttactcaccttatccccaaatgatcattgtcgttcaaggtgcgtaatattagtaagaagtatttatcagcttaacgtgataacaataatagtaatatgaaatatttattaaatttttataattaatctctgctagaaatttgattaa

SEQ ID NO: 6324 - DNA, 643 bp, Artificial
  Mutations within GlyA3B4 introduced by GmGlyA3B4_T03TALE nuclease
gttcatgtacggttgcagatataaacgaagcatagcttatgtatgaggtgtaacaaaattggaaacaatagccatgcaaggtgaagaatgtcaccaactcagaaacccttcttcattgacgtgtccctcactcactctcctctcttcactataaatcgccactcttcgtgttctccacttcaccaactccttcaaacttattaacactttccttagttcaatatggggaagcccttcttcactctctctctttcttccctttgcttgctactcttgtcgagtgcatgctttgctattacctccagctagtgccaactcaacaacctcaacgcgttggaacccgaccaccgcgttgagtccgaaggtggtcttattgaaacatggaactctcaacaccctgagctgcaatgcgccggtgtcactgtttccaaacgcaccctcaaccgcaacggcctccacttgccatcttactcaccttatccccaaatgatcattgtcgttcaaggtgcgtaatattagtaagaagtatttatcagcttaacgtgataacaataatagtaatatgaaatatttattaaatttttataattaatctctgctagaaaatttgattaatcattttagtagaatttgttttctcaac

SEQ ID NO: 6325 - DNA, 642 bp, Artificial
  Mutations within GlyA3B4 introduced by GmGlyA3B4_T03TALE nuclease
  misc_feature (550): n is a or c or t or g
gttcatgtacggttgcagatataaacgaagcatagcttatgtatgaggtgtaacaaaattggaaacaatagccatgcaaggtgaagaatgtcaccaactcagaaacccttcttcattgacgtgtccctcactcactctcctctcttcactataaatcgccactcttcgtgttctccacttcaccaactccttcaaacttattaacactttccttagttcaatatggggaagcccttcttcactctctctctttcttccctttgcttgctactcttgtcgagtgcatgctttgctattacctccagcaacctcaacgcgttggaacccgaccaccgcgttgagtccgaaggtggtcttattgaaacatggaactctcaacaccctgagctgcaatgcgccggtgtcactgtttccaaacgcaccctcaaccgcaacggcctccacttgccatcttactcaccttatcccccaaatgatcattgtcgttcaaggtgcgtaaatattagtaagaagtatttatcagcttaacgtgataacaataatagtaatntgaaatatttattaaattttttataattaatctctgctagaaaatttgattaatcatttttagtagaatttgttttttctcaactaggtttt

SEQ ID NO: 6326 - DNA, 663 bp, Artificial
  Mutations within GlyA3B4 introduced by GmGlyA3B4_T03TALE nuclease
gttcatgtacggttgcagatataaacgaagcatagcttatgtatgaggtgtaacaaaattggaaacaatagccatgcaaggtgaagaatgtcaccaactcagaaacccttcttcattgacgtgtccctcactcactctcctctcttcactataaatcgccactcttcgtgttctccacttcaccaactccttcaaacttattaacactttccttagttcaatatggggaagcccttcttcactctctctctttcttccctttgcttgctactcttgtcgagtgcatgctttgctattacctccagcaagtgccaactcaacaacctcaacgcgttggaacccgaccaccgcgttgagtccgaaggtggtcttattgaaacatggaactctcaacaccctgagctgcaatgcgccggtgtcactgtttccaaacgcaccctcaaccgcaacggcctccacttgccatcttactcaccttatcccccaaatgatcattgtcgttcaaggtgcgtaatattagtaagaagtatttatcagcttaacgtgataacaataatagtaatatgaaatatttattaaatttttataattaatctctgctagaaaatttgattaatcattttagtagaatttgtttttctcaactaggtttttaaaacacca

SEQ ID NO: 6327 - DNA, 668 bp, Artificial
  Mutations within GlyA3B4 introduced by GmGlyA3B4_T03TALE nuclease
gttcatgtacggttgcagatataaacgaagcatagcttatgtatgaggtgtaacaaaattggaaacaatagccatgcaaggtgaagaatgtcaccaactcagaaacccttcttcattgacgtgtccctcactcactctccatctcttcactataaatcgccactcttcgtgttctccacttcaccaactccttcaaacttattaacactttccttagttcaatatggggaagcccttcttcactctctctctttcttccctttgcttgctactcttgtcgagtgcatgctttgctattacctccagcaagttagtgccaactcaacaacctcaacgcgttggaacccgaccaccgcgttgagtccgaaggtggtcttattgaaacatggaactctcaacaccctgagctgcaatgcgccggtgtcactgtttccaaacgcaccctcaccgcaacggcctccaacgcttgccatcttgcactcaccttatccccaatgatcattgtcgttcaaggtgcgtaatattagtaagaagtatttatcagcttaacgtgatacaatatagtaatatgaaatatttattaaatttttataattaatctctgctagaaaatttgattaatcatttttagtagaatttgtttttctcaactaggtttttaaacacca

SEQ ID NO: 6328 - DNA, 645 bp, Artificial; identical to SEQ ID NO: 5931
  Mutations within GlyA3B4 introduced by GmGlyA3B4_T03TALE nuclease

SEQ ID NO: 6329 - DNA, 660 bp, Artificial
  Mutations within GlyA3B4 introduced by GmGlyA3B4_T03TALE nuclease
gttcatgtacggttgcagatataaacgaagcatagcttatgtatgaggtgtaacaaaattggaaacaatagccatgcaaggtgaagaatgtcaccaactcagaaacccttcttcattgacgtgtccctcactcactctcctctcttcactataaatcgccactcttcgtgttctccacttcaccaactccttcaaacttattaacactttccttagttcaatatggggaagcccttcttcactctctctctttcttccctttgcttgctactcttgtcgagtgcatgctttgctattacctccagcaatgccaactcaacaacctcaacgcgttggaaccccgaccaccgcgttgagtccgaaggtggtcttattgaaacatggaactctcaacaccctgagctgcaatgcgccggtgtcactgtttccaaacgcaccctcaaccgcaacggcctccacttgccatcttactcaccttatccccaaatgatcattgtcgttcaaggtgcgtaatattagtaagaagtatttatcagcttaacgtgataacaataatagtaatatgaaatatttattaaatttttataattaatctctgctagaaaatttgattaatcattttagtagaatttgttttctcaactaggttttaaaacacca

SEQ ID NO: 6330 - DNA, 584 bp, Artificial
  Mutations within GlyA3B4 introduced by GmGlyA3B4_T03TALE nuclease
gttcatgtacggttgcagatataaacgaagcatagcttatgtatgaggtgtaacaaaaattggaaacaatagccatgcaaggtgaagaatgtcaccaactcagaaacccttcttcattgacgtgtccctcactcactctcctctcttcactataaatcgccactcttcgtgttctccacttcaccaactccttcaaacttattaacactttccttagttcaatatggggaagcccttcttcactctctctctttcttccctttgcttgctactcttgtcgagtgcatgctttgctattacctccagcaagttcaccacctgctggggggtcaagccgtggcctggcacagcaccggcaacagccgctggaccgtctccagcgcctgcttgccaccgccattgctggcgatggccaccgagtgccaactcaacaacctcaacgcgttggaaccgaccaccgcgttgagtccgaaggtggtcttattgaaacatggaactctcaacaccctgagctgcaatgcgccggtgtcactgtttccaaacgcaccctcaaccgcaacggcctccacttgccatcttactca

SEQ ID NO: 6331 - DNA, 650 bp, Artificial; identical to SEQ ID NO: 5501
  Mutations within GlyA3B4 introduced by GmGlyA3B4_T03TALE nuclease

SEQ ID NO: 6332 - DNA, 485 bp, Artificial
  Mutations within GlyA3B4 introduced by GmGlyA3B4_T03TALE nuclease
gttcatgtacggttgcagatataaacgaagcatagcttatgtatgaggtgtaacaaaattggaaacaatagccatgcaaggtgaagaatgtcaccaactcagaaacccttcttcattgacgtgtccctcactcactctcctctcttcactataaatcgccactcttcgtgttctccacttcaccaactccttcaaacttattaacactttccttagttcaatatggggaagcccttcttcactctctctctttcttccctttgcttgctactcttgtcgacaaccgcgttgagtccgaaggtggtcttattgaaacatggaactctcaacaccctgagctgcaatgcgccggtgtcactgtttccaaacgcacccctcaaccgcaacggcctccacttgccatcttactcaccttatcccccaaatgatcattgtcgttcaaggtgcgtaatattagtaagaagtatttatcagcttaacgtgat

SEQ ID NO: 6333 - DNA, 658 bp, Artificial
  Mutations within GlyA3B4 introduced by GmGlyA3B4_T03TALE nuclease
gttcatgtacggttgcagatataaacgaagcatagcttatgtatgaggtgtaacaaaattggaaacaatagccatgcaaggtgaagaatgtcaccaactcagaaacccttcttcattgacgtgtccctcactcactctcctctcttcactataaatcgccactcttcgtgttctccacttcaccaactccttcaaacttattaacactttccttagttcaatatggggaagcccttcttcactctctctctttcttccctttgcttgctactcttgtcgagtgcatgctttgctattacctccagcaagtagtgccaactcaacaacctcaacgcgttggaacccgaccaccgcgttgagtccgaaggtggtcttattgaaacatggaactctcaacaccctgagctgcaatgcgccggtgtcactgtttccaaacgcaccctcaaccgcaacggcctccacttgccatcttactcaccttatcccccaaatgatcattgtcgttcaaggtgcgtaatattagtaagaagtatttatcagcttaacgtgatacaatatagtaatatgaaatatttattaaatttttataatttaatctctgctagaaaatttgattaatcattttagtagaatttgttttctcaactaggttttaaaa

SEQ ID NO: 6334 - DNA, 659 bp, Artificial
  Mutations within GlyA3B4 introduced by GmGlyA3B4_T03TALE nuclease
gttcatgtacggttgcagatataaacgaagcatagcttatgtatgaggtgtaacaaaaattggaaacaatagccatgcaaggtgaagaatgtcaccaactcagaaacccttcttcattgacgtgtccctcactcactctcctctcttcactataaatcgccactcttcgtgttctccacttcaccaactccttcaaacttattaacactttccttagttcaatatggggaagcccttcttcactctctctctttcttccctttgcttgctactcttgtcgagtgcatgctttgctattacctccagcaagttcagtgccaactcaacaacctcaacgcgttggaacccgaccaccgcgttgagtccgaaggtggtcttattgaaacatggaactctcaacaccctgagctgcaatgcgccggtgtcactgtttccaaacgcaccctcaaccgcaacggcctccacttgccatcttactcaccttatccccaaatgatcattgtcgttcaaggtgcgtaatattagtaagaagtatttatcagcttaacgtgatacaatatagtaatatgaaatatttattaaatttttataattaatctctgctagaaaatttgattaatcattttagtagaatttgttttctcaactaggttttaaaa

SEQ ID NO: 6335 - DNA, 652 bp, Artificial
  Mutations within GlyA3B4 introduced by GmGlyA3B4_T03TALE nuclease
  misc_feature (532): n is a or c or t or g
gttcatgtacggttgcagatataaacgaagcatagcttatgtatgaggtgtaacaaaattggaaacaatagccatgcaaggtgaagaatgtcaccaactcagaaacccttcttcattgacgtgtccctcactcactctcctctcttcactataaatcgccactcttcgtgttctccacttcaccaactccttcaaacttattaacactttccttagttcaatatggggaagcccttcttcactctctctctttcttccctttgcttgctactcttgtcgagtgcatgctttgctattacctccagcaagttcgagtgccaactcaacaacctcaacgcgttggaacccgaccaccgcgttgagtccgaaggtggtcttattgaaacatggaactctcaacaccctgagctgcaatgcgccggtgtcactgtttccaaacgcaccctcaaccgcaacggcctccacttgccatcttactcaccttatccccaaatgatcattgtcgttcaaggtgcgtaatattagtaagagnatttatcagcttaacgtgataacaatatagtaatatgaaatatttattaaatttttataattaatctctgctagaaaatttgattaatcattttagtagaatttgtttttctcaactagg

SEQ ID NO: 6336 - DNA, 663 bp, Artificial
  Mutations within GlyA3B4 introduced by GmGlyA3B4_T03TALE nuclease
gttcatgtacggttgcagatataaacgaagcatagcttatgtatgaggtgtaacaaaattggaaacaatagccatgcaaggtgaagaatgtcaccaactcagaaacccttcttcattgacgtgtccctcactcactctcctctcttcactataaatcgccactcttcgtgttctccacttcaccaactccttcaaacttattaacactttccttagttcaatatggggaagcccttcttcactctctctctttcttccctttgcttgctactcttgtcgagtgcatgctttgctattacctccagcaagttagtgccaactcaacaacctcaacgcgttggaacccgaccaccgcgttgagtccgaaggtggtcttattgaaacatggaactctcaacaccctgagctgcaatgcgccggtgtcactgtttccaaacgcaccctcaaccgcaacggcctccacttgccatcttactcaccttatcccccaaatgatcattgtcgttcaaggtgcgtaatattagtaagaagtatttatcagcttaacgtgataacaatatagtaatatgaaatatttattaaatttttataattaatctctgctagaaaatttgattaatcattttagtagaatttgttttctcaactaggttttaaacacca

SEQ ID NO: 6337 - DNA, 694 bp, Artificial
  Mutations within GlyA3B4 introduced by GmGlyA3B4_T03TALE nuclease
gttcatgtacggttgcagatataaacgaagcatagcttatgtatgaggtgtaacaaaattggaaacaatagccatgcaaggtgaagaatgtcaccaactcagaaacccttcttcattgacgtgtccctcactcactctcctctcttcactataaatcgccactcttcgtgttctccacttcaccaactccttcaaacttattaacactttccttagttcaatatggggaagcccttcttcactctctctctttcttccctttgcttgctactcttgtcgagtgcatgctttgctattaccccccaatcccttttttcactgcatccagcgcaggacgcccgccgaggcaggccaaggcgacgaggtggtcgacgagtgccaactcaacaacctcaacgcgttggaacccgaccaccgcgttgagtccgaaggtggtcttattgaaacatggaactctcaacaccctgagctgcaatgcgccggtgtcactgtttccaaacgcaccctcaaccgcaacggcctccacttgccatcttactcacctttatccccaaatgatcattgtcgttcaaggtgcgtaatattagtaagaagtatttatcagcttaacgtgataacaataatagtaatatgaaaatatttattaaattttttataattaatctctgctagaaaaatttgattaatcattttt

SEQ ID NO: 6338 - DNA, 601 bp, Artificial
  Mutations within GlyA3B4 introduced by GmGlyA3B4_T03TALE nuclease
gttcatgtacggttgcagatataaacgaagcatagcttatgtatgaggtgtaacaaaattggaaacaatagccatgcaaggtgaagaatgtcaccaactcagaaacccttcttcattgacgtgtccctcactcactctcctctcttcactataaatcgccactcttcgtgttctccacttcaccaactccttcaaacttattaacactttccttagttcaatatggggaagcccttcttcactctctctctttcttccctttgctgagtgccaactcaacaacctcaacgcgttggaacccgaccaccgcgttgagtccgaaggtggtcttattgaaacatggaactctcaacaccctgagctgcaatgcgccggtgtcactgtttccaaacgcaccctcaaccgcaacggcctccacttgccatcttactcaccttatccccaaatgatcattgtcgttcaaggtgcgtaatattagtaagaagtatttatcagcttaacgtgataacaataatagtaatatgaatatttattaatttttataattaatctctgctagaaaatttgattaatcatttttagtagaatttgtttttctcaa

SEQ ID NO: 6339 - DNA, 442 bp, Artificial
  Mutations within GlyA3B4 introduced by GmGlyA3B4_T03TALE nuclease
gttcatgtacggttgcagatataaacgaagcatagcttatgtagaggtgtaacaaaattggaaacaatagccatgcaaggtgaagaatgtcaccaactcagaaacccttcttcattgacgtgtccctcactcactctcctctcttcactataaatcgccactcttcgtgttctccacttcaccaactccttcaaacttattaacactttccttagttcaatatggggaagcccttcttcactctctctctttcttccctttgcttgctactcttgtcgagtgccaactcaacaatcctcacgcgttggaacccgaccacgcgttgagtccgaaggtggtctattgaacatggaactctcaacaccctgagctgcaatgcgccggtgtcactgtttccaaacgcaccctcaaccgcaacggcctccacttgccatcttactca

SEQ ID NO: 6340 - DNA, 650 bp, Artificial; identical to SEQ ID NO: 4923
  Mutations within GlyA3B4 introduced by GmGlyA3B4_T03TALE nuclease

SEQ ID NO: 6341 - DNA, 664 bp, Artificial
  Mutations within GlyA3B4 introduced by GmGlyA3B4_T03TALE nuclease
gttcatgtacggttgcagatataaacgaagcatagcttatgtatgaggtgtaacaaaattggaaacaatagccatgcaaggtgaagaatgtcaccaactcagaaacccttcttcattgacgtgtccctcactcactctcctctcttcactataaatcgccactcttcgtgttctccacttcaccaactccttcaaacttattaacactttccttagttcaatatggggaagcccttcttcactctctctctttcttccctttgcttgctactcttgtcgagtgcatgctttgctattacctccagcaaagtgccaactcaacaacctcaacgcgttggaacccgaccaccgcgttgagtccgaaggtggtcttattgaaacatggaactctcaacaccctgagctgcaatgcgccggtgtcactgtttccaaacgcaccctcaaccgcaacggcctccacttgccatcttactcaccttatccccaaatgatcattgtcgttcaaggtgcgtaatattagtaagaagtatttatcagcttaacgtgataacaataatagtaatatgaaaatatttattaaatttttataattaatctctgctagaaaatttgattaatcatttttagtagaatttgtttttctcaactaggttttaaaacacca

SEQ ID NO: 6342 - DNA, 642 bp, Artificial
  Mutations within GlyA3B4 introduced by GmGlyA3B4_T03TALE nuclease
gttcatgtacggttgcagatataaacgaagcatagcttatgtatgaggtgtaacaaaattggaaacaatagccatgcaaggtgaagaatgtcaccaactcagaaacccttcttcattgacgtgtccctcactcactctcctctcttcactataaatcgccactcttcgtgttctccacttcaccaactccttcaaacttattaacactttccttagttcaatatggggaagcccttcttcactctctctctttcttccctttgcttgctactcttgtcgagtgcatgctttgctattacctccagcagttcgagtgccaactcaacaacctcaacgcgttggaacccgaccaccgcgttgagtccgaaggtggtcttattgaaacatggaactctcaacaccctgagctgcaatgcgccggtgtcactgtttccaaacgcaccctcaaccgcaacggcctccacttgccatcttactcaccttatccccaaatgatcattgtcgttcaaggtgcgtaatattagtaagagtatttatcagcttaacgtgatacaataatagtaatatgaaatatttattaaatttttcataattaatctctgctagaaaatttgattaatcattttagtagaatttgttttt

SEQ ID NO: 6343 - DNA, 646 bp, Artificial
  Mutations within GlyA3B4 introduced by GmGlyA3B4_T03TALE nuclease
gttcatgtacggttgcagatataaacgaagcatagcttatgtatgaggtgtaacaaaattggaaacaatagccatgcaaggtgaagaatgtcaccaactcagaaacccttcttcattgacgtgtccctcactcactctcctctcttcactataaatcgccactcttcgtgttctccacttcaccaactccttcaaacttattaacactttccttagttcaatatggggaagcccttcttcactctctctctttcttccctttgcttgctactcttgtcgagtgcatgctttgctattacctccagcaatcaacacctcaacgcgttggaacccgaccaccgcgttgagtccgaaggtggtcttattgaaacatggaactctcaacaccctgagctgcaatgcgccggtgtcactgtttccaaacgcaccctcaaccgcaacggcctccacttgccatcttactcaccttatccccaaatgatcattgtcgttcaaggtgcgtaatattagtaagaagtatttatcagcttaacgtgataacaataatagtaatatgaaatatttattaaattttttataattaatctctgctagaaaatttgattaatcatttttagtagaatttgttttttctcaactaggtttt

SEQ ID NO: 6344 - DNA, 741 bp, Artificial
  Mutations within GlyA3B4 introduced by GmGlyA3B4_T03TALE nuclease
  misc_feature (637); (679): n is a or c or t or g
gttcatgtacggttgcagatataaacgaagcatagcttatgtatgaggtgtaacaaaattggaaacaatagccatgcaaggtgaagaatgtcaccaactcagaaacccttcttcattgacgtgtccctcactcactctcctctcttcactataaatcgccactcttcgtgttctccacttcaccaactccttcaaacttattaacactttccttagttcaatatggggaagcccttcttcactctctctctttcttccctttgcttgctactcttgtcgagtgcatgctttgctattacctccagcaagttcatcgccagcaatggcggtggcaagcaggcgctggagacggtccagcggctgttgccggtgctgtgccaggcccacggcttgaccccccagcaggtggtggccatcgccagccactgagtgccaactcaacaacctcaacgcgttggaacccgaccaccgcgttgagtccgaaggtggtcttattgaaacatggaactctcaacaccctgagctgcaatgcgccggtgtcactgtttccaaacgcaccctcaaccgcaacgggcctccacttgccatcttactcaccttatccccaaatgatcattgtcgttcaaggtgcgtaatnttagtaagaagtatttatcagcttaacgtgataacaataatngtaatatgaaatatttattaaattttttataattaatctctgctagaaaatttgattaatca

SEQ ID NO: 6345 - DNA, 618 bp, Artificial; identical to SEQ ID NO: 5404
  Mutations within GlyA3B4 introduced by GmGlyA3B4_T03TALE nuclease

SEQ ID NO: 6346 - DNA, 625 bp, Artificial
  Mutations within GlyA3B4 introduced by GmGlyA3B4_T03TALE nuclease
gttcatgtacggttgcagatataaacgaagcatagcttatgtatgaggtgtaacaaaaattggaaacaatagccatgcaaggtgaagaatgtcaccaactcagaaaccccttcttcattgacgtgtccctcactcactctcctctcttcactataaatcgccactcttcgtgttctccacttcaccaactccttcaaacttattaacactttccttagttcaatatggggaagcccttcttcactctctctctttcttccctttgcttgctactcttgtcgagtgcatgctttgctattacctccagcaagttctgccaactcaacaacctcaacgcgttggaacccgaccaccgcgttgagtccgaaggtggtcttattgaaacatggaactctcaacaccctgagctgcaatgcgccggtgtcactgtttccaaacgcacccctcaaccgcaacggcctccacttgccatcttactcaccttatcccccaaatgatcattgtcgttcaaggtgcgtaatattagtaagaagtatttatcagcttaacgtgataacaataatagtaatatgaaatatttattaaatttttataattaatctctgctagaaaatttgattaatca

SEQ ID NO: 6347 - DNA, 658 bp, Artificial; identical to SEQ ID NO: 5379
  Mutations within GlyA3B4 introduced by GmGlyA3B4_T03TALE nuclease

SEQ ID NO: 6348 - DNA, 24 bp, Artificial
  CLXGmGLY3i1F Primer
ttcactataaatcgccactcttcg

SEQ ID NO: 6349 - DNA, 25 bp, Artificial
  CLXGmGLY3i2R Primer
ctaatattacgcaccttgaacgaca

SEQ ID NO: 6350 - DNA, 23 bp, Artificial
  CLXGmGLY504H Primer
accactcctcatgttctttccaa

SEQ ID NO: 6351 - DNA, 25 bp, Artificial
  CLXGmGLY505H Primer
gttgagagttccatgtttgaatcaa

SEQ ID NO: 6352 - DNA, 55 bp, Glycine max
  Gy5 sequence
tgcttgctactcttgtcgagtgcatgctttgctattacctccagcaagttcaacg

SEQ ID NO: 6353 - DNA, 50 bp, Artificial
  Deletion in Gy5
tgcttgctactcttgtcgagtgcatgctattacctccagcaagttcaacg

SEQ ID NO: 6354 - DNA, 47 bp, Artificial
  Deletion in Gy5
tgcttgctactcttgtcgagtgcatattacctccagcaagttcaacg

SEQ ID NO: 6355 - DNA, 45 bp, Artificial
  Deletion in Gy5
tgcttgctactcttgtcgagtgcattacctccagcaagttcaacg

SEQ ID NO: 6356 - DNA, 44 bp, Artificial
  Deletion in Gy5
tgcttgctactcttgtcgagtgcatacctccagcaagttcaacg

SEQ ID NO: 6357 - DNA, 49 bp, Artificial
  Deletion in Gy5
tgcttgctactcttgtcgagtgcatctattacctccagcaagttcaacg

SEQ ID NO: 6358 - DNA, 46 bp, Artificial
  Deletion in Gy5
tgcttgctactcttgtcgagtgctattacctccagcaagttcaacg

SEQ ID NO: 6359 - DNA, 47 bp, Artificial
  Deletion in Gy5
tgcttgctactcttgtcgagtgcctattacctccagcaagttcaacg

SEQ ID NO: 6360 - DNA, 46 bp, Artificial
  Deletion in Gy5
tgcttgctactcttgtcgagtgcatttacctccagcaagttcaacg

SEQ ID NO: 6361 - DNA, 48 bp, Artificial
  Deletion in Gy5
tgcttgctactcttgtcgagtgcattattacctccagcaagttcaacg

SEQ ID NO: 6362 - DNA, 40 bp, Artificial
  Deletion in Gy5
tgcttgctactcttgtcgagtgcatccagcaagttcaacg

SEQ ID NO: 6363 - DNA, 41 bp, Artificial
  Deletion in Gy5
tgcttgctactcttgtcgagttacctccagcaagttcaacg

SEQ ID NO: 6364 - DNA, 40 bp, Artificial
  Deletion in Gy5
tgcttgctactcttgtctattacctccagcaagttcaacg

SEQ ID NO: 6365 - DNA, 48 bp, Artificial
  Deletion in Gy5
tgcttgctactcttgtcgagtgcactattacctccagcaagttcaacg

SEQ ID NO: 6366 - DNA, 30 bp, Artificial
  Deletion in Gy5
tgcttgctattacctccagcaagttcaacg

SEQ ID NO: 6367 - DNA, 49 bp, Triticum aestivum
  TaGliadin_T01 target site
ttagagttccagtgccacaattgcagccacaaaatccatctcagcaaca

SEQ ID NO: 6368 - DNA, 49 bp, Triticum aestivum
  TaGliadin_T02 target site
tctcatccttgccctccttgctatcgtggcgaccaccgccacaactgca

SEQ ID NO: 6369 - DNA, 52 bp, Triticum aestivum
  TaGliadin_T03 target site
tcagcaacagccacaagagcaagttccattggtgcaacaacaacaatttcca

SEQ ID NO: 6370 - DNA, 49 bp, Triticum aestivum
  TaGliadin_T04 target site
ttgcagttagagttccagtgccacaattgcagccacaaaatccatctca

SEQ ID NO: 6371 - DNA, 48 bp, Artificial
  Mutations within Triticum aestivum gliadin gene introduced by TaGliadin_T01.1 TALE nuclease
ttagagttccagtgccacaattgcagcacaaaatccatctcagcaaca

SEQ ID NO: 6372 - DNA, 45 bp, Artificial
  Mutations within Triticum aestivum gliadin gene introduced by TaGliadin_T01.1 TALE nuclease
ttagagttccagtgccacaattgccaaaaatccatctcagcaaca

SEQ ID NO: 6373 - DNA, 44 bp, Artificial
  Mutations within Triticum aestivum gliadin gene introduced by TaGliadin_T01.1 TALE nuclease
ttagagttccagtgccacaattcacaaaatccatctcagcaaca

SEQ ID NO: 6374 - DNA, 41 bp, Artificial
  Mutations within Triticum aestivum gliadin gene introduced by TaGliadin_T01.1 TALE nuclease
ttagagttccagtgccacaattaaaatccatctcagcaaca

SEQ ID NO: 6375 - DNA, 42 bp, Artificial
  Mutations within Triticum aestivum gliadin gene introduced by TaGliadin_T01.1 TALE nuclease
ttagagttccagtgccacaatacaaaatccatctcagcaaca

SEQ ID NO: 6376 - DNA, 37 bp, Artificial
  Mutations within Triticum aestivum gliadin gene introduced by TaGliadin_T01.1 TALE nuclease
ttagagttccagtgccacaaaatccatctcagcaaca

SEQ ID NO: 6377 - DNA, 35 bp, Artificial
  Mutations within Triticum aestivum gliadin gene introduced by TaGliadin_T01.1 TALE nuclease
ttagagttccagtgccacaatccatctcagcaaca

SEQ ID NO: 6378 - DNA, 40 bp, Artificial
  Mutations within Triticum aestivum gliadin gene introduced by TaGliadin_T01.1 TALE nuclease
ttagagttccagtgccaccacaaaatccatctcagcaaca

SEQ ID NO: 6379 - DNA, 34 bp, Artificial
  TALEN induced mutations within Glycine max Gy5, A3B4 gene
ttgctactcttgtcgagtacctccagcaagttca

SEQ ID NO: 6380 - DNA, 41 bp, Artificial
  TALEN induced mutations within Glycine max Gy5, A3B4 gene
ttgctactcttgtcgagtgcctattacctccagcaagttca

SEQ ID NO: 6381 - DNA, 44 bp, Artificial
  TALEN induced mutations within Glycine max Gy5, A3B4 gene
ttgctactcttgtcgagtgcatgctattacctccagcaagttca

SEQ ID NO: 6382 - DNA, 40 bp, Artificial
  TALEN induced mutations within Glycine max Gy5, A3B4 gene
ttgctactcttgtcgagtgctattacctccagcaagttca

SEQ ID NO: 6383 - DNA, 44 bp, Artificial; identical to SEQ ID NO: 6381
  TALEN induced mutations within Glycine max Gy5, A3B4 gene

SEQ ID NO: 6384 - DNA, 33 bp, Artificial
  TALEN induced mutations within Glycine max Gy5, A3B4 gene
ttgctactcttgtcgagtgctccagcaagttca

SEQ ID NO: 6385 - DNA, 44 bp, Artificial; identical to SEQ ID NO: 6381
  TALEN induced mutations within Glycine max Gy5, A3B4 gene

SEQ ID NO: 6386 - DNA, 41 bp, Artificial
  TALEN induced mutations within Glycine max Gy5, A3B4 gene
ttgctactcttgtcgagtgcatattacctccagcaagttca

SEQ ID NO: 6387 - DNA, 43 bp, Artificial
  TALEN induced mutations within Glycine max Gy5, A3B4 gene
ttgctactcttgtcgagtgcatctattacctccagcaagttca

SEQ ID NO: 6388 - DNA, 36 bp, Artificial
  TALEN induced mutations within Glycine max Gy5, A3B4 gene
ttgctactcttgtcgagtgcatctccagcaagttca

SEQ ID NO: 6389 - DNA, 49 bp, Artificial
  TALEN induced mutations within Glycine max Gy4, A5A4B3 gene
ttgctactcttgtcgagtgcatgctttgctattagctccagcaagctca

SEQ ID NO: 6390 - DNA, 38 bp, Artificial
  TALEN induced mutations within Glycine max Gy4, A5A4B3 gene
ttgctactcttgtcgagtgcatagctccagcaagctca

SEQ ID NO: 6391 - DNA, 45 bp, Artificial
  TALEN induced mutations within Glycine max Gy4, A5A4B3 gene
ttgctactcttgtcgagtgcattgctattagctccagcaagctca

SEQ ID NO: 6392 - DNA, 44 bp, Artificial
  TALEN induced mutations within Glycine max Gy4, A5A4B3 gene
ttgctactcttgtcgagtgcatgctattagctccagcaagctca

SEQ ID NO: 6393 - DNA, 42 bp, Artificial
  TALEN induced mutations within Glycine max Gy4, A5A4B3 gene
ttgctactcttgtcgagtgaactattagctccagcaagctca

SEQ ID NO: 6394 - DNA, 27 bp, Artificial
  TALEN induced mutations within Glycine max Gy4, A5A4B3 gene
ttgctactcttgtcgagtgcaagctca

SEQ ID NO: 6395 - DNA, 43 bp, Artificial
  TALEN induced mutations within Glycine max Gy4, A5A4B3 gene
ttgctactcttgtcgagtgctgctattagctccagcaagctca

SEQ ID NO: 6396 - DNA, 41 bp, Artificial
  TALEN induced mutations within Glycine max Gy4, A5A4B3 gene
ttgctactcttgtcgagtgcatattagctccagcaagctca

SEQ ID NO: 6397 - DNA, 43 bp, Artificial
  TALEN induced mutations within Glycine max Gy5, A3B4 gene
tgcttgctactcttgtcgagtgctacctccagcaagttcaacg

SEQ ID NO: 6398 - DNA, 49 bp, Artificial
  TALEN induced mutations within Glycine max Gy5, A3B4 gene
tgcttgctactcttgtcgagtgcagctattacctccagcaagttcaacg

SEQ ID NO: 6399 - DNA, 50 bp, Artificial
  TALEN induced mutations within Glycine max Gy5, A3B4 gene
tgcttgctactcttgtcgagtgcttgctattacctccagcaagttcaacg

SEQ ID NO: 6400 - DNA, 48 bp, Artificial
  TALEN induced mutations within Glycine max Gy5, A3B4 gene
tgcttgctactcttgtcgagtgcgctattacctccagcaagttcaacg

SEQ ID NO: 6401 - protein, 152 aa, Artificial
  N152 TALEN backbone amino acid sequence
TAAAKFERQHMDSIDIADLRTLGYSQQQQEKIKPKVRSTVAQHHEALVGHGFTHAHIVALSQHPAALGTVAVKYQDMIAALPEATHEAIVGVGKQWSGARALEALLTVAGELRGPPLQLDTGQLLKIAKRGGVTAVEAVHAWRNALTGAPLN

SEQ ID NO: 6402 - protein, 40 aa, Artificial
  C40 TALEN backbone amino acid sequence
SIVAQLSRPDPALAALTNDHLVALACLGGRPALDAVKKGL

SEQ ID NO: 6403 - protein, 7 aa, Artificial
  SV40 NLS signal
PKKKRKV

SEQ ID NO: 6404 - DNA, 44 bp, Artificial
  TALEN induced mutations within Glycine max Gy5, A3B4 gene
tgcttgctactcttgtcgagtgcttacctccagcaagttcaacg

SEQ ID NO: 6405 - DNA, 27 bp, Artificial
  TALEN induced mutations within Glycine max Gy5, A3B4 gene
tgcttgctactcttgtcgagtgccaac

SEQ ID NO: 6406 - DNA, 43 bp, Artificial
  TALEN induced mutations within Glycine max Gy5, A3B4 gene
tgcttgctactcttgtcgagtattacctccagcaagttcaacg

SEQ ID NO: 6407 - DNA, 55 bp, Glycine max
  Gy4 sequence
tgcttgctactcttgtcgagtgcatgctttgctattagctccagcaagctcaacg

SEQ ID NO: 6408 - DNA, 50 bp, Artificial
  TALEN induced mutations within Glycine max Gy4, A5A4B3 gene
tgcttgctactcttgtcgagtgcatgctattagctccagcaagctcaacg

SEQ ID NO: 6409 - DNA, 47 bp, Artificial
  TALEN induced mutations within Glycine max Gy4, A5A4B3 gene
tgcttgctactcttgtcgagtgcatattagctccagcaagctcaacg

SEQ ID NO: 6410 - DNA, 51 bp, Artificial
  TALEN induced mutations within Glycine max Gy4, A5A4B3 gene
tgcttgctactcttgtcgagtgcattgctattagctccagcaagctcaacg

SEQ ID NO: 6411 - DNA, 52 bp, Artificial
  TALEN induced mutations within Glycine max Gy4, A5A4B3 gene
tgcttgctactcttgtcgagtgcatttgctattagctccagcaagctcaacg

SEQ ID NO: 6412 - DNA, 49 bp, Artificial
  TALEN induced mutations within Glycine max Gy4, A5A4B3 gene
tgcttgctactcttgtcgagtgcatctattagctccagcaagctcaacg

SEQ ID NO: 6413 - DNA, 45 bp, Artificial
  TALEN induced mutations within Glycine max Gy4, A5A4B3 gene
tgcttgctactcttgtcgagtgcattagctccagcaagctcaacg

SEQ ID NO: 6414 - DNA, 44 bp, Artificial
  TALEN induced mutations within Glycine max Gy4, A5A4B3 gene
tgcttgctactcttgtcgagtgcatagctccagcaagctcaacg

SEQ ID NO: 6415 - DNA, 46 bp, Artificial
  TALEN induced mutations within Glycine max Gy4, A5A4B3 gene
tgcttgctactcttgtcgagtgctattagctccagcaagctcaacg

SEQ ID NO: 6416 - DNA, 48 bp, Artificial
  TALEN induced mutations within Glycine max Gy4, A5A4B3 gene
tgcttgctactcttgtcgagtgcattattagctccagcaagctcaacg

SEQ ID NO: 6417 - DNA, 48 bp, Artificial
  TALEN induced mutations within Glycine max Gy4, A5A4B3 gene
tgcttgctactcttgtcgagtgcactattagctccagcaagctcaacg

SEQ ID NO: 6418 - DNA, 56 bp, Artificial
  TALEN induced mutations within Glycine max Gy4, A5A4B3 gene
tgcttgctactcttgtcgagtgcatgcttttgctattagctccagcaagctcaacg

SEQ ID NO: 6419 - DNA, 43 bp, Artificial
  TALEN induced mutations within Glycine max Gy4, A5A4B3 gene
tgcttgctactcttgtcgagtattagctccagcaagctcaacg

SEQ ID NO: 6420 - DNA, 51 bp, Artificial
  TALEN induced mutations within Glycine max Gy4, A5A4B3 gene
tgcttgctactcttgtcgagtgcatggctattagctccagcaagctcaacg

SEQ ID NO: 6421 - DNA, 50 bp, Artificial
  TALEN induced mutations within Glycine max Gy4, A5A4B3 gene
tgcttgctactcttgtcgagtgcttgctattagctccagcaagctcaacg

SEQ ID NO: 6422 - DNA, 49 bp, Artificial
  TALEN induced mutations within Glycine max Gy4, A5A4B3 gene
tgcttgctactcttgtcgagtgcatgtattagctccagcaagctcaacg
